(19) United States
(12) Patent Application Publication
(10) Pub. No.: US 2014/0298541 A1
(43) Pub. Date: Oct. 2, 2014

(54) ISOLATED POLYNUCLEOTIDES EXPRESSING OR MODULATING dsRNAs, TRANSGENIC PLANTS COMPRISING SAME AND USES THEREOF IN IMPROVING NITROGEN USE EFFICIENCY, ABIOTIC STRESS TOLERANCE, BIOMASS, VIGOR OR YIELD OF A PLANT

(71) Applicant: A.B. Seeds Ltd., Lod (IL)

(72) Inventors: Rudy Maor, Rechovot (IL); Iris Nesher, Tel-Aviv (IL); Orly Noivirt-Brik, Givataim (IL)

(73) Assignee: A.B. Seeds Ltd., Lod (IL)

(21) Appl. No.: 14/238,743

(22) PCT Filed: Aug. 14, 2012
(86) PCT No.: PCT/IB2012/054147

§ 371 Date: Jun. 19, 2014

Related U.S. Application Data
(60) Provisional application No. 61/523,370, filed on Aug. 14, 2011.

(51) Int. Cl. C12N 15/113

(52) U.S. Cl. CPC C12N 15/113
USPC 800/286; 536/24.5; 435/320.1; 800/298

(57) ABSTRACT

A method of improving nitrogen use efficiency, abiotic stress tolerance, biomass, vigor or yield of a plant is provided by expressing within the plant an exogenous polynucleotide at least 90% identical to SEQ ID NOs: 1-56, 62, 63, 110, 116, 117, 119-161, 200, 201-255, 1027-1031, 1459-1836. Also provided is a method of improving nitrogen use efficiency, abiotic stress tolerance, biomass, vigor or yield of a plant by expressing within the plant an exogenous polynucleotide which downregulates an activity or expression of a gene encoding an RNAi molecule having a nucleic acid sequence selected from the group consisting of SEQ ID NOs: 57-61, 64-115, 118, 162-200, 260-262, 265-267, 271, 1032-1455, 1810-1827, 1842-2265, 2620-2643, 2742-2792. Also provided are polynucleotides and nucleic acid constructs for the generation of transgenic plants.

### FIELD AND BACKGROUND OF THE INVENTION

[0001] The present invention, in some embodiments thereof, relates to isolated polynucleotides expressing or modulating dsRNAs, transgenic plants comprising same and uses thereof in improving nitrogen use efficiency, abiotic stress tolerance, biomass, vigor or yield of plants.

[0002] Plant growth is reliant on a number of basic factors: light, air, water, nutrients, and physical support. All these factors, with the exception of light, are controlled by soil to some extent, which integrates non-living substances (minerals, organic matter, gases and liquids) and living organisms (bacteria, fungi, insects, worms, etc.). The soil's volume is almost equally divided between solids and water/gases. An adequate nutrition in the form of natural as well as synthetic fertilizers, may affect crop yield and quality, and its response to stress factors such as disease and adverse weather. The great importance of fertilizers can best be appreciated when considering the direct increase in crop yields over the last 40 years, and the fact that they account for most of the overhead expense in agriculture. Sixteen natural nutrients are essential for plant growth, three of which, carbon, hydrogen and oxygen, are retrieved from air and water. The soil provides the remaining 13 nutrients.

[0003] Nutrients are naturally recycled within a self-sufficient environment, such as a rainforest. However, when grown in a commercial situation, plants consume nutrients for their growth and these nutrients need to be replenished in the system. Several nutrients are consumed by plants in large quantities and are referred to as macronutrients. Three macronutrients are considered the basic building blocks of plant growth, and are provided as main fertilizers; Nitrogen (N), Phosphate (P) and Potassium (K). Yet, only nitrogen needs to be replenished every year since plants only absorb approximately half of the nitrogen fertilizer applied. A proper balance of nutrients is crucial; when too much of an essential nutrient is available, it may become toxic to plant growth. Utilization efficiencies of macronutrients directly correlate with yield and general plant tolerance, and increasing them will benefit the plants themselves and the environment by decreasing seepage to ground water.

[0004] Nitrogen is responsible for biosynthesis of amino and nucleic acids, prosthetic groups, plant hormones, plant chemical defenses, etc, and thus is utterly essential for the plant. For this reason, plants store nitrogen throughout their developmental stages, in the specific case of corn during the period of grain germination, mostly in the leaves and stalk. However, due to the low nitrogen use efficiency (NUE) of the main crops (e.g., in the range of only 30-70%), nitrogen supply needs to be replenished at least twice during the growing season. This requirement for fertilizer refill may become the rate-limiting element in plant growth and increase fertilizer expenses for the farmer. Limited land resources combined with rapid population growth will inevitably lead to added increase in fertilizer use. In light of this prediction, advanced, biotechnology-based solutions to allow stable high yields with an added potential to reduce fertilizer costs are highly desirable. Subsequently, developing plants with increased NUE will lower fertilizer input in crop cultivation, and allow growth on lower-quality soils.

[0005] The major agricultural crops (corn, rice, wheat, canola and soybean) account for over half of total human caloric intake, giving their yield and quality vast importance. They can be consumed either directly (eating their seeds which are also used as a source of sugars, oils and metabolites), or indirectly (eating meat products raised on processed seeds or forage). Various factors may influence a crop's yield, including but not limited to, quantity and size of the plant organs, plant architecture, vigor (e.g., seedling), growth rate, root development, utilization of water and nutrients (e.g., nitrogen), and stress tolerance. Plant yield may be amplified through multiple approaches; (1) enhancement of innate traits (e.g., dry matter accumulation rate, cellulose/lignin composition), (2) improvement of structural features (e.g., stalk strength, meristem size, plant branching pattern), and (3) amplification of seed yield and quality (e.g., fertilization efficiency, seed development, seed filling or content of oil, starch or protein). Increasing plant yield through any of the above methods would ultimately have many applications in agriculture and additional fields such as in the biotechnology industry.

[0006] Two main adverse environmental conditions, malnutrition (nutrient deficiency) and drought, elicit a response in the plant that mainly affects root architecture (Jiang and Huang (2001), Crop Sci 41:1168-1173; Lopez-Bucio et al. (2003), Curr Opin Plant Biol, 6:280-287; Morgan and Condon (1986), Aust J Plant Physiol 13:523-532), causing activation of plant metabolic pathways to maximize water assimilation. Improvement of root architecture, i.e. making branched and longer roots, allows the plant to reach water and nutrient/fertilizer deposits located deeper in the soil by an increase in soil coverage. Root morphogenesis has already shown to increase tolerance to low phosphorus availability in soybean (Miller et al., (2003), Funct Plant Biol 30:973-985) and maize (Zhu and Lynch (2004), Funct Plant Biol 31:949-958). Thus, genes governing enhancement of root architecture may be used to improve NUE and drought tolerance. An example for a gene associated with root developmental changes is ANR1, a putative transcription factor with a role in nitrate (NO3⁻) signaling. When expression of ANR1 is down-regulated, the resulting transgenic lines are defective in their root response to localized supplies of nitrate (Zhang and Forde (1998), Science 270:407). Enhanced root system and/or increased storage capabilities, which are seen in responses to different environmental stresses, are strongly favorable at normal or optimal growing conditions as well.

[0007] Abiotic stress refers to a range of suboptimal conditions as water deficit or drought, extreme temperatures and salt levels, and high or low light levels. High or low nutrient level also falls into the category of abiotic stress. The response to any stress may involve both stress specific and common stress pathways (Pastori and Foyer (2002), Plant Physiol, 129: 460-468), and drains energy from the plant, eventually resulting in lowered yield. Thus, distinguishing between the genes activated in each pathway and subsequent manipulation of only specific relevant genes could lead to a partial stress response without the parallel loss in yield. Contrary to the complex polygenic nature of plant traits responsible for adaptations to adverse environmental stresses, information on miRNAs involved in these responses is very limited. The most common approach for crop and horticultural improvements is through cross breeding, which is relatively slow, inefficient, and limited in the degree of variability achieved because it can only manipulate the naturally existing genetic diversity. Taken together with the limited genetic resources (i.e., compatible plant species) for crop improvement, conventional breeding is evidently unfavorable. By creating a pool of genetically modified plants, one broadens the possibilities for producing crops with improved economic or horticultural traits.

### SUMMARY OF THE INVENTION

[0008] According to an aspect of some embodiments of the present invention there is provided a method of improving nitrogen use efficiency, abiotic stress tolerance, biomass, vigor or yield of a plant, the method comprising expressing within the plant an exogenous polynucleotide having a nucleic acid sequence at least 90% identical to SEQ ID NOs: 1-56, 62, 63, 110, 116, 117, 119-161, 200, 201-255, 1027-1031, 1459-1836, wherein the nucleic acid sequence is capable of regulating nitrogen use efficiency of the plant, thereby improving nitrogen use efficiency, abiotic stress tolerance, biomass, vigor or yield of the plant.

[0009] According to an aspect of some embodiments of the present invention there is provided a transgenic plant exogenously expressing a polynucleotide having a nucleic acid sequence at least 90% identical to SEQ ID NOs: 1-56, 62, 63, 110, 116, 117, 119-161, 200, 201-255, 1027-1031, 1459-1836, wherein the nucleic acid sequence is capable of regulating nitrogen use efficiency of the plant.

[0010] According to an aspect of some embodiments of the present invention there is provided an isolated polynucleotide having a nucleic acid sequence at least 90% identical to SEQ ID NO: 1-3, 8-57, 60, 65-113, 119-200, 2691-2792 (novel mirs predicted), wherein the nucleic acid sequence is capable of regulating nitrogen use efficiency of a plant.

[0011] According to an aspect of some embodiments of the present invention there is provided a nucleic acid construct comprising the isolated polynucleotide of some embodiments of the invention under the regulation of a cis-acting regulatory element.

[0012] According to an aspect of some embodiments of the present invention there is provided a method of improving nitrogen use efficiency, abiotic stress tolerance, biomass, vigor or yield of a plant, the method comprising expressing within the plant an exogenous polynucleotide which downregulates an activity or expression of a gene encoding an RNAi molecule having a nucleic acid sequence selected from the group consisting of SEQ ID NOs: 57-61, 64-115, 118, 162-200, 260-262, 265-267, 271, 1032-1455, 1810-1827, 1842-2265, 2620-2643, 2742-2792, thereby improving nitrogen use efficiency, abiotic stress tolerance, biomass, vigor or yield of a plant. According to an aspect of some embodiments of the present invention there is provided a transgenic plant exogenously expressing a polynucleotide which downregulates an activity or expression of a gene encoding an RNAi molecule having a nucleic acid sequence selected from the group consisting of SEQ ID NOs: 57-61, 64-115, 118, 162-200, 260-262, 265-267, 271, 1032-1455, 1810-1827, 1842-2265, 2620-2643, 2742-2792.

[0013] According to an aspect of some embodiments of the present invention there is provided an isolated polynucleotide which downregulates an activity or expression of a gene encoding an RNAi molecule having a nucleic acid sequence selected from the group consisting of SEQ ID NOs: 57-61, 64-115, 118, 162-200, 260-262, 265-267, 271, 1032-1455, 1810-1827, 1842-2265, 2620-2643, 2742-2792.

[0014] According to an aspect of some embodiments of the present invention there is provided a nucleic acid construct comprising the isolated polynucleotide of some embodiments of the invention under the regulation of a cis-acting regulatory element.

[0015] According to some embodiments of the invention, the exogenous polynucleotide encodes a precursor of the nucleic acid sequence.

[0016] According to some embodiments of the invention, the precursor is at least 60% identical to SEQ ID NO: 256-259, 263, 264, 268-270, 272-309, 310-326, 1837-1841, 2269-2619, 2644-2658, 2691-2741 and 2793.

[0017] According to some embodiments of the invention, the exogenous polynucleotide encodes a miRNA or a precursor thereof.

[0018] According to some embodiments of the invention, the exogenous polynucleotide encodes a siRNA or a precursor thereof.

[0019] According to some embodiments of the invention, the exogenous polynucleotide is selected from the group consisting of SEQ ID NO: 1-56, 62, 63, 110, 116, 117, 119-161, 200, 201-255, 1027-1031, 1459-1836.

[0020] According to some embodiments of the invention, the polynucleotide encodes a precursor of the nucleic acid sequence.

[0021] According to some embodiments of the invention, the polynucleotide encodes a miRNA or a precursor thereof.

[0022] According to some embodiments of the invention, the polynucleotide encodes a siRNA or a precursor thereof.

[0023] According to some embodiments of the invention, the cis-acting regulatory element comprises a promoter.

[0024] According to some embodiments of the invention, the promoter comprises a tissue-specific promoter.

[0025] According to some embodiments of the invention, the tissue-specific promoter comprises a root specific promoter.

[0026] According to some embodiments of the invention, the polynucleotide encodes a miRNA-Resistant Target as set forth in SEQ ID NO: 616-815.

[0027] According to some embodiments of the invention, the isolated polynucleotide encodes a target mimic as set forth in SEQ ID NO: 822-1025.

[0028] According to some embodiments of the invention, the cis-acting regulatory element comprises a promoter.

[0029] According to some embodiments of the invention, the promoter comprises a tissue-specific promoter.

[0030] According to some embodiments of the invention, the tissue-specific promoter comprises a root specific promoter.

[0031] According to some embodiments of the invention, the method further comprising growing the plant under limiting nitrogen conditions.

[0032] According to some embodiments of the invention, the method further comprising growing the plant under abiotic stress.

[0033] According to some embodiments of the invention, the abiotic stress is selected from the group consisting of salinity, drought, water deprivation, flood, etiolation, low temperature, high temperature, heavy metal toxicity, anaerobiosis, nutrient deficiency, nutrient excess, atmospheric pollution and UV irradiation.

[0034] According to some embodiments of the invention, the plant being a monocotyledon.

[0035] According to some embodiments of the invention, the plant being a dicotyledon.

[0036] Implementation of the method and/or system of embodiments of the invention can involve performing or completing selected tasks manually, automatically, or a combination thereof. Moreover, according to actual instrumentation and equipment of embodiments of the method and/or system of the invention, several selected tasks could be implemented by hardware, by software or by firmware or by a combination thereof using an operating system.

[0037] For example, hardware for performing selected tasks according to embodiments of the invention could be implemented as a chip or a circuit. As software, selected tasks according to embodiments of the invention could be implemented as a plurality of software instructions being executed by a computer using any suitable operating system. In an exemplary embodiment of the invention, one or more tasks according to exemplary embodiments of method and/or system as described herein are performed by a data processor, such as a computing platform for executing a plurality of instructions. Optionally, the data processor includes a volatile memory for storing instructions and/or data and/or a non-volatile storage, for example, a magnetic hard-disk and/or removable media, for storing instructions and/or data. Optionally, a network connection is provided as well. A display and/or a user input device such as a keyboard or mouse are optionally provided as well.

### BRIEF DESCRIPTION OF THE DRAWINGS

[0038] Some embodiments of the invention are herein described, by way of example only, with reference to the accompanying drawings. With specific reference now to the drawings in detail, it is stressed that the particulars shown are by way of example and for purposes of illustrative discussion of embodiments of the invention. In this regard, the description taken with the drawings makes apparent to those skilled in the art how embodiments of the invention may be practiced.

[0039] In the drawings:

[0040] FIG. 1 is a scheme of a binary vector that can be used according to some embodiments of the invention;

[0041] FIG. 2 is a schematic description of miRNA assay including two steps, stem-loop RT and real-time PCR. Stem-loop RT primers bind to at the 3′ portion of miRNA molecules and are reverse transcribed with reverse transcriptase. Then, the RT product is quantified using conventional TaqMan PCR that includes miRNA-specific forward primer and reverse primer. The purpose of tailed forward primer at 5′ is to increase its melting temperature (Tm) depending on the sequence composition of miRNA molecules (Slightly modified from Chen et al. 2005, Nucleic Acids Res 33(20):e179).

### DESCRIPTION OF SPECIFIC EMBODIMENTS OF THE INVENTION

[0042] The present invention, in some embodiments thereof, relates to isolated polynucleotides expressing or modulating double stranded (ds) RNAs, transgenic plants comprising same and uses thereof in improving nitrogen use efficiency, abiotic stress tolerance, biomass, vigor or yield of plants.

[0043] Before explaining at least one embodiment of the invention in detail, it is to be understood that the invention is not necessarily limited in its application to the details set forth in the following description or exemplified by the Examples. The invention is capable of other embodiments or of being practiced or carried out in various ways.

[0044] The doubling of agricultural food production worldwide over the past four decades has been associated with a 7-fold increase in the use of nitrogen (N) fertilizers. As a consequence, both the recent and future intensification of the use of nitrogen fertilizers in agriculture already has and will continue to have major detrimental impacts on the diversity and functioning of the non-agricultural neighbouring bacterial, animal, and plant ecosystems. The most typical examples of such an impact are the eutrophication of freshwater and marine ecosystems as a result of leaching when high rates of nitrogen fertilizers are applied to agricultural fields. In addition, there can be gaseous emission of nitrogen oxides reacting with the stratospheric ozone and the emission of toxic ammonia into the atmosphere. Furthermore, farmers are facing increasing economic pressures with the rising fossil fuels costs required for production of nitrogen fertilizers.

[0045] It is therefore of major importance to identify the critical steps controlling plant nitrogen use efficiency (NUE). Such studies can be harnessed towards generating new energy crop species that have a larger capacity to produce biomass with the minimal amount of nitrogen fertilizer.

[0046] While reducing the present invention to practice, the present inventors have uncovered dsRNA sequences that are differentially expressed in maize plants grown under nitrogen limiting conditions versus corn plants grown under conditions wherein nitrogen is a non-limiting factor. Following extensive experimentation and screening the present inventors have identified RNA interfering (RNAi) dsRNA molecules including siRNA and miRNA sequences that are upregulated or downregulated in roots and leaves, and suggest using same or sequences controlling same in the generation of transgenic plants having improved nitrogen use efficiency.

[0047] According to some embodiments, the newly uncovered dsRNA sequences relay their effect by affecting at least one of:

[0048] root architecture so as to increase nutrient uptake;

[0049] activation of plant metabolic pathways so as to maximize nitrogen absorption or localization; or alternatively or additionally

[0050] modulating plant surface permeability.

[0051] Each of the above mechanisms may affect water uptake as well as salt absorption and therefore embodiments of the invention further relate to enhancement of abiotic stress tolerance, biomass, vigor or yield of the plant.

[0052] Thus, according to an aspect of the invention there is provided a method of improving nitrogen use efficiency, abiotic stress tolerance, biomass, vigor or yield of a plant, the method comprising expressing within the plant an exogenous polynucleotide having a nucleic acid sequence at least 90% identical to SEQ ID NOs: 1-56, 62, 63, 110, 116, 117, 119-161, 200, 201-255, 1027-1031, 1459-1836, wherein the nucleic acid sequence is capable of regulating nitrogen use efficiency of the plant, thereby improving nitrogen use efficiency, abiotic stress tolerance, biomass, vigor or yield of the plant

[0053] As used herein the phrase “nitrogen use efficiency (NUE)” refers to a measure of crop production per unit of nitrogen fertilizer input. Fertilizer use efficiency (FUE) is a measure of NUE. Crop production can be measured by biomass, vigor or yield. The plant's nitrogen use efficiency is typically a result of an alteration in at least one of the uptake, spread, absorbance, accumulation, relocation (within the plant) and use of nitrogen absorbed by the plant. Improved NUE is with respect to that of a non-transgenic plant (i.e., lacking the transgene of the transgenic plant) of the same species and of the same developmental stage and grown under the same conditions.

[0054] As used herein the phrase “nitrogen-limiting conditions” refers to growth conditions which include a level (e.g., concentration) of nitrogen (e.g., ammonium or nitrate) applied which is below the level needed for optimal plant metabolism, growth, reproduction and/or viability.

[0055] The phrase “abiotic stress” as used herein refers to any adverse effect on metabolism, growth, viability and/or reproduction of a plant. Abiotic stress can be induced by any of suboptimal environmental growth conditions such as, for example, water deficit or drought, flooding, freezing, low or high temperature, strong winds, heavy metal toxicity, anaerobiosis, high or low nutrient levels (e.g. nutrient deficiency), high or low salt levels (e.g. salinity), atmospheric pollution, high or low light intensities (e.g. insufficient light) or UV irradiation. Abiotic stress may be a short term effect (e.g. acute effect, e.g. lasting for about a week) or alternatively may be persistent (e.g. chronic effect, e.g. lasting for example 10 days or more). The present invention contemplates situations in which there is a single abiotic stress condition or alternatively situations in which two or more abiotic stresses occur.

[0056] According to an exemplary embodiment the abiotic stress refers to salinity.

[0057] According to another exemplary embodiment the abiotic stress refers to drought.

[0058] As used herein the phrase “abiotic stress tolerance” refers to the ability of a plant to endure an abiotic stress without exhibiting substantial physiological or physical damage (e.g. alteration in metabolism, growth, viability and/or reproductivity of the plant).

[0059] As used herein the term/phrase “biomass”, “biomass of a plant” or “plant biomass” refers to the amount (e.g., measured in grams of air-dry tissue) of a tissue produced from the plant in a growing season. An increase in plant biomass can be in the whole plant or in parts thereof such as aboveground (e.g. harvestable) parts, vegetative biomass, roots and/or seeds.

[0060] As used herein the term/phrase “vigor”, “vigor of a plant” or “plant vigor” refers to the amount (e.g., measured by weight) of tissue produced by the plant in a given time. Increased vigor could determine or affect the plant yield or the yield per growing time or growing area. In addition, early vigor (e.g. seed and/or seedling) results in improved field stand.

[0061] As used herein the term/phrase “yield”, “yield of a plant” or “plant yield” refers to the amount (e.g., as determined by weight or size) or quantity (e.g., numbers) of tissues or organs produced per plant or per growing season. Increased yield of a plant can affect the economic benefit one can obtain from the plant in a certain growing area and/or growing time.

[0062] According to an exemplary embodiment the yield is measured by cellulose content.

[0063] According to another exemplary embodiment the yield is measured by oil content.

[0064] According to another exemplary embodiment the yield is measured by protein content.

[0065] According to another exemplary embodiment, the yield is measured by seed number per plant or part thereof (e.g., kernel).

[0066] A plant yield can be affected by various parameters including, but not limited to, plant biomass; plant vigor; plant growth rate; seed yield; seed or grain quantity; seed or grain quality; oil yield; content of oil, starch and/or protein in harvested organs (e.g., seeds or vegetative parts of the plant); number of flowers (e.g. florets) per panicle (e.g. expressed as a ratio of number of filled seeds over number of primary panicles); harvest index; number of plants grown per area; number and size of harvested organs per plant and per area; number of plants per growing area (e.g. density); number of harvested organs in field; total leaf area; carbon assimilation and carbon partitioning (e.g. the distribution/allocation of carbon within the plant); resistance to shade; number of harvestable organs (e.g. seeds), seeds per pod, weight per seed; and modified architecture [such as increase stalk diameter, thickness or improvement of physical properties (e.g. elasticity)].

[0067] As used herein the term “improving” or “increasing” refers to at least about 2%, at least about 3%, at least about 4%, at least about 5%, at least about 10%, at least about 15%, at least about 20%, at least about 25%, at least about 30%, at least about 35%, at least about 40%, at least about 45%, at least about 50%, at least about 60%, at least about 70%, at least about 80%, at least about 90% or greater increase in NUE, in tolerance to abiotic stress, in yield, in biomass or in vigor of a plant, as compared to a native or wild-type plants [i.e., plants not genetically modified to express the biomolecules (polynucleotides) of the invention, e.g., a non-transformed plant of the same species and of the same developmental stage which is grown under the same growth conditions as the transformed plant].

[0068] Improved plant NUE is translated in the field into either harvesting similar quantities of yield, while implementing less fertilizers, or increased yields gained by implementing the same levels of fertilizers. Thus, improved NUE or FUE has a direct effect on plant yield in the field.

[0069] The term “plant” as used herein encompasses whole plants, ancestors and progeny of the plants and plant parts, including seeds, shoots, stems, roots (including tubers), and isolated plant cells, tissues and organs. The plant may be in any form including suspension cultures, embryos, meristematic regions, callus tissue, leaves, gametophytes, sporophytes, pollen, and microspores.

[0070] As used herein the phrase “plant cell” refers to plant cells which are derived and isolated from disintegrated plant cell tissue or plant cell cultures.

[0071] As used herein the phrase “plant cell culture” refers to any type of native (naturally occurring) plant cells, plant cell lines and genetically modified plant cells, which are not assembled to form a complete plant, such that at least one biological structure of a plant is not present. Optionally, the plant cell culture of this aspect of the present invention may comprise a particular type of a plant cell or a plurality of different types of plant cells. It should be noted that optionally plant cultures featuring a particular type of plant cell may be originally derived from a plurality of different types of such plant cells.

[0072] Any commercially or scientifically valuable plant is envisaged in accordance with these embodiments of the invention. Plants that are particularly useful in the methods of the invention include all plants which belong to the super family Viridiplantae, in particular monocotyledonous and dicotyledonous plants including a fodder or forage legume, ornamental plant, food crop, tree, or shrub selected from the list comprising Acacia spp., Acer spp., Actinidia spp., Aesculus spp., Agathis australis, Albizia amara, Alsophila tricolor, Andropogon spp., Arachis spp, Areca catechu, Astelia fragrans, Astragalus cicer, Baikiaea plurijuga, Betula spp., Brassica spp., Bruguiera gymnorrhiza, Burkea africana, Butea frondosa, Cadaba farinosa, Calliandra spp, Camellia sinensis, Canna indica, Capsicum spp., Cassia spp., Centroema pubescens, Chacoomeles spp., Cinnamomum cassia, Coffea arabica, Colophospermum mopane, Coronillia varia, Cotoneaster serotina, Crataegus spp., Cucumis spp., Cupressus spp., Cyathea dealbata, Cydonia oblonga, Cryptomeria japonica, Cymbopogon spp., Cynthea dealbata, Cydonia oblonga, Dalbergia monetaria, Davallia divaricata, Desmodium spp., Dicksonia squarosa, Dibeteropogon amplectens, Dioclea spp, Dolichos spp., Dorycnium rectum, Echinochloa pyramidalis, Ehraffia spp., Eleusine coracana, Eragrestis spp., Erythrina spp., Eucalyptus spp., Euclea schimperi, Eulalia vi/losa, Pagopyrum spp., Feijoa sellowlana, Fragaria spp., Flemingia spp, Freycinetia banksli, Geranium thunbergii, GinAgo biloba, Glycine javanica, Gliricidia spp, Gossypium hirsutum, Grevillea spp., Guibourtia coleosperma, Hedysarum spp., Hemaffhia altissima, Heteropogon contoffus, Hordeum vulgare, Hyparrhenia rufa, Hypericum erectum, Hypeffhelia dissolute, Indigo incamata, Iris spp., Leptarrhena pyrolifolia, Lespediza spp., Lettuca spp., Leucaena leucocephala, Loudetia simplex, Lotonus bainesli, Lotus spp., Macrotyloma axillare, Malus spp., Manihot esculenta, Medicago saliva, Metasequoia glyptostroboides, Musa sapientum, Nicotianum spp., Onobrychis spp., Ornithopus spp., Oryza spp., Peltophorum africanum, Pennisetum spp., Persea gratissima, Petunia spp., Phaseolus spp., Phoenix canariensis, Phormium cookianum, Photinia spp., Picea glauca, Pinus spp., Pisum sativam, Podocarpus totara, Pogonarthria fleckii, Pogonaffhria squarrosa, Populus spp., Prosopis cineraria, Pseudotsuga menziesii, Pterolobium stellatum, Pyrus communis, Quercus spp., Rhaphiolepsis umbellata, Rhopalostylis sapida, Rhus natalensis, Ribes grossularia, Ribes spp., Robinia pseudoacacia, Rosa spp., Rubus spp., Salix spp., Schyzachyrium sanguineum, Sciadopitys vefficillata, Sequoia sempervirens, Sequoiadendron giganteum, Sorghum bicolor, Spinacia spp., Sporobolus fimbriatus, Stiburus alopecuroides, Stylosanthos humilis, Tadehagi spp, Taxodium distichum, Themeda triandra, Trifolium spp., Triticum spp., Tsuga heterophylla, Vaccinium spp., Vicia spp., Vitis vinifera, Watsonia pyramidata, Zantedeschia aethiopica, Zea mays, amaranth, artichoke, asparagus, broccoli, Brussels sprouts, cabbage, canola, carrot, cauliflower, celery, collard greens, flax, kale, lentil, oilseed rape, okra, onion, potato, rice, soybean, straw, sugar beet, sugar cane, sunflower, tomato, squash tea, maize, wheat, barely, rye, oat, peanut, pea, lentil and alfalfa, cotton, rapeseed, canola, pepper, sunflower, tobacco, eggplant, eucalyptus, a tree, an ornamental plant, a perennial grass and a forage crop. Alternatively algae and other non-Viridiplantae can be used for the methods of the present invention.

[0073] According to some embodiments of the invention, the plant used by the method of the invention is a crop plant including, but not limited to, cotton, Brassica vegetables, oilseed rape, sesame, olive tree, palm oil, banana, wheat, corn or maize, barley, alfalfa, peanuts, sunflowers, rice, oats, sugarcane, soybean, turf grasses, barley, rye, sorghum, sugar cane, chicory, lettuce, tomato, zucchini, bell pepper, eggplant, cucumber, melon, watermelon, beans, hibiscus, okra, apple, rose, strawberry, chile, garlic, pea, lentil, canola, mums, arabidopsis, broccoli, cabbage, beet, quinoa, spinach, squash, onion, leek, tobacco, potato, sugarbeet, papaya, pineapple, mango, Arabidopsis thaliana, and also plants used in horticulture, floriculture or forestry, such as, but not limited to, poplar, fir, eucalyptus, pine, an ornamental plant, a perennial grass and a forage crop, coniferous plants, moss, algae, as well as other plants listed in World Wide Web (dot) nationmaster (dot) com/encyclopedia/Plantae.

[0074] According to a specific embodiment of the present invention, the plant comprises corn.

[0075] According to a specific embodiment of the present invention, the plant comprises sorghum.

[0076] As used herein, the phrase “exogenous polynucleotide” refers to a heterologous nucleic acid sequence which may not be naturally expressed within the plant or which overexpression in the plant is desired. The exogenous polynucleotide may be introduced into the plant in a stable or transient manner, so as to produce a ribonucleic acid (RNA) molecule. It should be noted that the exogenous polynucleotide may comprise a nucleic acid sequence which is identical or partially homologous to an endogenous nucleic acid sequence of the plant.

[0077] As mentioned the present teachings are based on the identification of RNA interfering molecular sequences (dsRNA, e.g., miRNAs and siRNAs) which modulate nitrogen use efficiency of plants.

[0078] According to some embodiments of the present aspect of the invention, the exogenous polynucleotide encodes an RNA interfering molecule.

[0079] Since its initial implementation, remarkable progress has been made in plant genetic engineering, and successful enhancements of commercially important crop plants have been reported (e.g., corn, cotton, soybean, canola, tomato). RNA interference (RNAi) is a remarkably potent technique and has steadily been established as the leading method for specific down-regulation/silencing of a target gene, through manipulation of one of two small RNA molecules, microRNAs (miRNAs) or small interfering RNAs (siRNAs). Both miRNAs and siRNAs are oligonucleotides (20-24 bps, i.e., the mature molecule) processed from longer RNA precursors by Dicer-like ribonucleases, although the source of their precursors is different (i.e., local single RNA molecules with imperfect stem-loop structures for miRNA, and long, double-stranded precursors potentially from bimolecular duplexes for siRNA). Additional characteristics that differentiate miRNAs from siRNAs are their sequence conservation level between related organisms (high in miRNAs, low to non-existent in siRNAs), regulation of genes unrelated to their locus of origin (typical for miRNAs, infrequent in siRNAs) and the genetic requirements for their respective functions are somewhat dissimilar in many organisms (Jones-Rhoades et al., 2006, Ann Rev Plant Biol 57:19-53). Despite all their differences, miRNAs and siRNAs are overall chemically and functionally similar and both are incorporated into silencing complexes, wherein they can guide post-transcriptional repression of multiple target genes, and thus function catalytically.

[0080] Thus, the exogenous polynucleotide encodes a dsRNA interfering molecule or a precursor thereof.

[0081] According to some embodiments the exogenous polynucleotide encodes a miRNA or a precursor thereof.

[0082] According to other embodiments the exogenous polynucleotide encodes a siRNA or a precursor thereof.

[0083] As used herein, the phrase “siRNA” (also referred to herein interchangeably as “small interfering RNA” or “silencing RNA”), is a class of double-stranded RNA molecules, 20-25 nucleotides in length. The most notable role of siRNA is its involvement in the RNA interference (RNAi) pathway, where it interferes with the expression of a specific gene.

[0084] The siRNA precursor relates to a long dsRNA structure (at least 90% complementarity) of at least 30 bp.

[0085] As used herein, the phrase “microRNA (also referred to herein interchangeably as “miRNA” or “miR”) or a precursor thereof” refers to a microRNA (miRNA) molecule acting as a post-transcriptional regulator. Typically, the miRNA molecules are RNA molecules of about 20 to 22 nucleotides in length which can be loaded into a RISC complex and which direct the cleavage of another RNA molecule, wherein the other RNA molecule comprises a nucleotide sequence essentially complementary to the nucleotide sequence of the miRNA molecule.

[0086] Typically, a miRNA molecule is processed from a “pre-miRNA” or as used herein a precursor of a pre-miRNA molecule by proteins, such as DCL proteins, present in any plant cell and loaded onto a RISC complex where it can guide the cleavage of the target RNA molecules.

[0087] Pre-microRNA molecules are typically processed from pri-microRNA molecules (primary transcripts). The single stranded RNA segments flanking the pre-microRNA are important for processing of the pri-miRNA into the pre-miRNA. The cleavage site appears to be determined by the distance from the stem-ssRNA junction (Han et al. 2006, Cell 125, 887-901, 887-901).

[0088] As used herein, a “pre-miRNA” molecule is an RNA molecule of about 100 to about 200 nucleotides, preferably about 100 to about 130 nucleotides which can adopt a secondary structure comprising a double stranded RNA stem and a single stranded RNA loop (also referred to as “hairpin”) and further comprising the nucleotide sequence of the miRNA (and its complement sequence) in the double stranded RNA stem. According to a specific embodiment, the miRNA and its complement are located about 10 to about 20 nucleotides from the free ends of the miRNA double stranded RNA stem. The length and sequence of the single stranded loop region are not critical and may vary considerably, e.g. between 30 and 50 nt (nucleotide) in length. The complementarity between the miRNA and its complement need not be perfect and about 1 to 3 bulges of unpaired nucleotides can be tolerated. The secondary structure adopted by an RNA molecule can be predicted by computer algorithms conventional in the art such as mFOLD. The particular strand of the double stranded RNA stem from the pre-miRNA which is released by DCL activity and loaded onto the RISC complex is determined by the degree of complementarity at the 5′ end, whereby the strand which at its 5′ end is the least involved in hydrogen bounding between the nucleotides of the different strands of the cleaved dsRNA stem is loaded onto the RISC complex and will determine the sequence specificity of the target RNA molecule degradation. However, if empirically the miRNA molecule from a particular synthetic pre-miRNA molecule is not functional (because the “wrong” strand is loaded on the RISC complex), it will be immediately evident that this problem can be solved by exchanging the position of the miRNA molecule and its complement on the respective strands of the dsRNA stem of the pre-miRNA molecule. As is known in the art, binding between A and U involving two hydrogen bounds, or G and U involving two hydrogen bounds is less strong that between G and C involving three hydrogen bounds. Exemplary hairpin sequences are provided in Tables 1 and 2 in the Examples section which follows.

[0089] Naturally occurring miRNA molecules may be comprised within their naturally occurring pre-miRNA molecules but they can also be introduced into existing pre-miRNA molecule scaffolds by exchanging the nucleotide sequence of the miRNA molecule normally processed from such existing pre-miRNA molecule for the nucleotide sequence of another miRNA of interest. The scaffold of the pre-miRNA can also be completely synthetic. Likewise, synthetic miRNA molecules may be comprised within, and processed from, existing pre-miRNA molecule scaffolds or synthetic pre-miRNA scaffolds. Some pre-miRNA scaffolds may be preferred over others for their efficiency to be correctly processed into the designed microRNAs, particularly when expressed as a chimeric gene wherein other DNA regions, such as untranslated leader sequences or transcription termination and polyadenylation regions are incorporated in the primary transcript in addition to the pre-microRNA.

[0090] According to the present teachings, the dsRNA molecules may be naturally occurring or synthetic.

[0091] Basically, siRNA and miRNA behave the same. Each can cleave perfectly complementary mRNA targets and decrease the expression of partially complementary targets.

[0092] Thus, the present teachings contemplate expressing an exogenous polynucleotide having a nucleic acid sequence at least 90%, 91%, 92%, 93%, 94%, 95%, 96%, 97%, 98% 99% or 100% identical to SEQ ID NOs: 1-56, 62, 63, 110, 116, 117, 119-161, 200, 201-255, 1027-1031, 1459-1836, provided that they regulate nitrogen use efficiency.

[0093] Alternatively or additionally, the present teachings contemplate expressing an exogenous polynucleotide having a nucleic acid sequence at least 65%, 50%, 75%, 80%, 85%, 90%, 91%, 92%, 93%, 94%, 95%, 96%, 97%, 98% 99% or 100% identical to SEQ ID NOs. 1-56, 62, 63, 110, 116, 117, 119-161, 200 (mature Tables 1, 3 and 7 representing the core maize genes), provided that they regulate nitrogen use efficiency.

[0094] Table 1 below illustrates exemplary miRNA sequences and precursors thereof which over expression are associated with modulation of nitrogen use efficiency. Likewise Table 3 provides similarly acting siRNA sequences.

[0095] The present invention envisages the use of homologous and orthologous sequences of the above RNA interfering molecules. At the precursor level use of homologous sequences can be done to a much broader extend. Thus, in such precursor sequences the degree of homology may be lower in all those sequences not including the mature miRNA or siRNA segment therein.

[0096] As used herein, the phrase “stem-loop precursor” refers to stem loop precursor RNA structure from which the miRNA can be processed. In the case of siRNA, the precursor is typically devoid of a stem-loop structure.

[0097] Thus, according to a specific embodiment, the exogenous polynucleotide encodes a stem-loop precursor of the nucleic acid sequence. Such a stem-loop precursor can be at least about 60%, at least about 65%, at least about 70%, at least about 75%, at least about 80%, at least about 85%, at least about 90%, at least about 95% or more identical to SEQ ID NOs: 2691-2741, 256-259, 2793, 272-309, 263, 264, 268, 269, 270, 310-326, 1837-1841, 2269-2619, 2644-2658 (homologs precursor Tables 1, 5 and 7), provided that it regulates nitrogen use efficiency.

[0098] Identity (e.g., percent identity) can be determined using any homology comparison software, including for example, the BlastN software of the National Center of Biotechnology Information (NCBI) such as by using default parameters.

[0099] Homology (e.g., percent homology, identity+similarity) can be determined using any homology comparison software, including for example, the TBLASTN software of the National Center of Biotechnology Information (NCBI) such as by using default parameters.

[0100] According to some embodiments of the invention, the term “homology” or “homologous” refers to identity of two or more nucleic acid sequences; or identity of two or more amino acid sequences.

[0101] Homologous sequences include both orthologous and paralogous sequences. The term “paralogous” relates to gene-duplications within the genome of a species leading to paralogous genes. The term “orthologous” relates to homologous genes in different organisms due to ancestral relationship. One option to identify orthologues in monocot plant species is by performing a reciprocal blast search. This may be done by a first blast involving blasting the sequence-of-interest against any sequence database, such as the publicly available NCBI database which may be found at: Hypertext Transfer Protocol://World Wide Web (dot) ncbi (dot) nlm (dot) nih (dot) gov. The blast results may be filtered. The full-length sequences of either the filtered results or the non-filtered results are then blasted back (second blast) against the sequences of the organism from which the sequence-of-interest is derived. The results of the first and second blasts are then compared. An orthologue is identified when the sequence resulting in the highest score (best hit) in the first blast identifies in the second blast the query sequence (the original sequence-of-interest) as the best hit. Using the same rational a paralogue (homolog to a gene in the same organism) is found. In case of large sequence families, the ClustalW program may be used [Hypertext Transfer Protocol://World Wide Web (dot) ebi (dot) ac (dot) uk/Tools/clustalw2/index (dot) html], followed by a neighbor-joining tree (Hypertext Transfer Protocol://en (dot) wikipedia (dot) org/wiki/Neighbor-joining) which helps visualizing the clustering.

[0102] The miRNA or precursor sequences can be provided to the plant as naked RNA or expressed from a nucleic acid expression construct, where it is operaly linked to a regulatory sequence.

[0103] Interestingly, while screening for RNAi regulatory sequences, the present inventors have identified a number of miRNA and siRNA sequences which have never been described before.

[0104] Thus, according to an aspect of the invention there is provided an isolated polynucleotide having a nucleic acid sequence at least 90%, 91%, 92%, 93%, 94%, 95%, 96%, 97%, 98% 99% or 100% identical to SEQ ID NO: 1-3, 8-57, 60, 65-113, 119-200 (Tables 1-7 predicted) or to the precursor sequence thereof, wherein the nucleic acid sequence is capable of regulating nitrogen use efficiency of a plant.

[0105] According to a specific embodiment, the isolated polynucleotide encodes a stem-loop precursor of the nucleic acid sequence.

[0106] According to a specific embodiment, the stem-loop precursor is at least about 60%, at least about 65%, at least about 70%, at least about 75%, at least about 80%, at least about 85%, at least about 90%, at least about 95% or more identical to the precursor sequence set forth in SEQ ID NOs: 2691-2792, (Tables 1-7 predicted precursors), provided that it regulates nitrogen use efficiency.

[0107] As mentioned, the present inventors have also identified RNAi sequences which are down regulated under nitrogen limiting conditions.

[0108] Thus, according to an aspect of the invention there is provided a method of improving nitrogen use efficiency, abiotic stress tolerance, biomass, vigor or yield of a plant, the method comprising expressing within the plant an exogenous polynucleotide which downregulates an activity or expression of a gene encoding an RNAi molecule having a nucleic acid sequence at least 90% homologous to the sequence selected from the group consisting of SEQ ID NOs: 57-61, 64-115, 118, 162-200, 260-262, 265-267, 271, 1032-1455, 1810-1827, 1842-2265, 2620-2643, 2742-2792, (Tables 2, 4, 6), thereby improving nitrogen use efficiency, abiotic stress tolerance, biomass, vigor or yield of a plant.

[0109] There are various approaches to down regulate RNAi sequences.

[0110] As used herein the term “down-regulation” refers to reduced activity or expression of the miRNA (at least 10%, 20%, 30%, 50%, 60%, 70%, 80%, 90% or 100% reduction in activity or expression) as compared to its activity or expression in a plant of the same species and the same developmental stage not expressing the exogenous polynucleotide.

[0111] Nucleic acid agents that down-regulate miR activity include, but are not limited to, a target mimic, a micro-RNA resistant gene and a miRNA inhibitor.

[0112] The target mimic or micro-RNA resistant target is essentially complementary to the microRNA provided that one or more of following mismatches are allowed:

[0113] (a) a mismatch between the nucleotide at the 5′ end of the microRNA and the corresponding nucleotide sequence in the target mimic or micro-RNA resistant target;

[0114] (b) a mismatch between any one of the nucleotides in position 1 to position 9 of the microRNA and the corresponding nucleotide sequence in the target mimic or micro-RNA resistant target; or

[0115] (c) three mismatches between any one of the nucleotides in position 12 to position 21 of the microRNA and the corresponding nucleotide sequence in the target mimic or micro-RNA resistant target provided that there are no more than two consecutive mismatches.

[0116] The target mimic RNA is essentially similar to the target RNA modified to render it resistant to miRNA induced cleavage, e.g. by modifying the sequence thereof such that a variation is introduced in the nucleotide of the target sequence complementary to the nucleotides 10 or 11 of the miRNA resulting in a mismatch.

[0117] Alternatively, a microRNA-resistant target may be implemented. Thus, a silent mutation may be introduced in the microRNA binding site of the target gene so that the DNA and resulting RNA sequences are changed in a way that prevents microRNA binding, but the amino acid sequence of the protein is unchanged. Thus, a new sequence can be synthesized instead of the existing binding site, in which the DNA sequence is changed, resulting in lack of miRNA binding to its target.

[0118] Tables 13 and 14 below provide non-limiting examples of target mimics and target resistant sequences that can be used to down-regulate the activity of the miRs/siRNAs of the invention.

[0119] According to a specific embodiment, the target mimic or micro-RNA resistant target is linked to the promoter naturally associated with the pre-miRNA recognizing the target gene and introduced into the plant cell. In this way, the miRNA target mimic or micro-RNA resistant target RNA will be expressed under the same circumstances as the miRNA and the target mimic or micro-RNA resistant target RNA will substitute for the non-target mimic/micro-RNA resistant target RNA degraded by the miRNA induced cleavage.

[0120] Non-functional miRNA alleles or miRNA resistant target genes may also be introduced by homologous recombination to substitute the miRNA encoding alleles or miRNA sensitive target genes.

[0121] Recombinant expression is effected by cloning the nucleic acid of interest (e.g., miRNA, target gene, silencing agent etc) into a nucleic acid expression construct under the expression of a plant promoter.

[0122] In other embodiments of the invention, synthetic single stranded nucleic acids are used as miRNA inhibitors. A miRNA inhibitor is typically between about 17 to 25 nucleotides in length and comprises a 5′ to 3′ sequence that is at least 90% complementary to the 5′ to 3′ sequence of a mature miRNA. In certain embodiments, a miRNA inhibitor molecule is 17, 18, 19, 20, 21, 22, 23, 24, or 25 nucleotides in length, or any range derivable therein. Moreover, a miRNA inhibitor has a sequence (from 5′ to 3′) that is or is at least 90%, 91%, 92%, 93%, 94%, 95%, 96%, 97%, 98%, 99%, 99.1%, 99.2%, 99.3%, 99.4%, 99.5%, 99.6%, 99.7%, 99.8%, 99.9% or 100% complementary, or any range derivable therein, to the 5′ to 3′ sequence of a mature miRNA, particularly a mature, naturally occurring miRNA.

[0123] The polynucleotide sequences of the invention can be provided to the plant as naked RNA or expressed from a nucleic acid expression construct, where it is operaly linked to a regulatory sequence.

[0124] According to a specific embodiment of the invention, there is provided a nucleic acid construct comprising a nucleic acid sequence encoding a miRNA or siRNA or a precursor thereof as described herein, the nucleic acid sequence being under a transcriptional control of a regulatory sequence such as a fiber-cell specific promoter.

[0125] Alternatively or additionally, there is provided a nucleic acid construct comprising a nucleic acid sequence encoding an inhibitor of the miRNA or siRNA sequences as described herein, the nucleic acid sequence being under a transcriptional control of a regulatory sequence such as a fiber-cell specific promoter.

[0126] An exemplary nucleic acid construct which can be used for plant transformation include, the pORE E2 binary vector (FIG. 1) in which the relevant polynucleotide sequence is ligated under the transcriptional control of a promoter.

[0127] A coding nucleic acid sequence is “operably linked” or “transcriptionally linked to a regulatory sequence (e.g., promoter)” if the regulatory sequence is capable of exerting a regulatory effect on the coding sequence linked thereto. Thus the regulatory sequence controls the transcription of the miRNA or precursor thereof.

[0128] The term “regulatory sequence”, as used herein, means any DNA, that is involved in driving transcription and controlling (i.e., regulating) the timing and level of transcription of a given DNA sequence, such as a DNA coding for a miRNA or siRNA, precursor or inhibitor of same. For example, a 5′ regulatory region (or “promoter region”) is a DNA sequence located upstream (i.e., 5′) of a coding sequence and which comprises the promoter and the 5′-untranslated leader sequence. A 3′ regulatory region is a DNA sequence located downstream (i.e., 3′) of the coding sequence and which comprises suitable transcription termination (and/or regulation) signals, including one or more polyadenylation signals.

[0129] For the purpose of the invention, the promoter is a plant-expressible promoter. As used herein, the term “plant-expressible promoter” means a DNA sequence which is capable of controlling (initiating) transcription in a plant cell. This includes any promoter of plant origin, but also any promoter of non-plant origin which is capable of directing transcription in a plant cell, i.e., certain promoters of viral or bacterial origin. Thus, any suitable promoter sequence can be used by the nucleic acid construct of the present invention. According to some embodiments of the invention, the promoter is a constitutive promoter, a tissue-specific promoter or an inducible promoter (e.g. an abiotic stress-inducible promoter).

[0130] Suitable constitutive promoters include, for example, hydroperoxide lyase (HPL) promoter, CaMV 35S promoter (Odell et al, Nature 313:810-812, 1985); Arabidopsis At6669 promoter (see PCT Publication No. WO04081173A2); maize Ubi 1 (Christensen et al., Plant Sol. Biol. 18:675-689, 1992); rice actin (McElroy et al., Plant Cell 2:163-171, 1990); pEMU (Last et al, Theor. Appl. Genet. 81:581-588, 1991); CaMV 19S (Nilsson et al, Physiol. Plant 100:456-462, 1997); GOS2 (de Pater et al, Plant J November; 2(6):837-44, 1992); ubiquitin (Christensen et al, Plant MoI. Biol. 18: 675-689, 1992); Rice cyclophilin (Bucholz et al, Plant MoI Biol. 25(5):837-43, 1994); Maize H3 histone (Lepetit et al, MoI. Gen. Genet. 231: 276-285, 1992); Actin 2 (An et al, Plant J. 10(1); 107-121, 1996) and Synthetic Super MAS (Ni et al., The Plant Journal 7: 661-76, 1995). Other constitutive promoters include those in U.S. Pat. Nos. 5,659,026, 5,608,149; 5,608,144; 5,604,121; 5,569,597: 5,466,785; 5,399,680; 5,268,463; and 5,608,142.

[0131] Suitable tissue-specific promoters include, but not limited to, leaf-specific promoters [such as described, for example, by Yamamoto et al., Plant J. 12:255-265, 1997; Kwon et al., Plant Physiol. 105:357-67, 1994; Yamamoto et al., Plant Cell Physiol. 35:773-778, 1994; Gotor et al., Plant J. 3:509-18, 1993; Orozco et al., Plant MoI. Biol. 23:1129-1138, 1993; and Matsuoka et al., Proc. Natl. Acad. Sci. USA 90:9586-9590, 1993], seed-preferred promoters [e.g., from seed specific genes (Simon, et al., Plant MoI. Biol. 5. 191, 1985; Scofield, et al., J. Biol. Chem. 262: 12202, 1987; Baszczynski, et al., Plant MoI. Biol. 14: 633, 1990), Brazil Nut albumin (Pearson′ et al., Plant MoI. Biol. 18: 235-245, 1992), legumin (Ellis, et al. Plant MoI. Biol. 10: 203-214, 1988), Glutelin (rice) (Takaiwa, et al., MoI. Gen. Genet. 208: 15-22, 1986; Takaiwa, et al., FEBS Letts. 221: 43-47, 1987), Zein (Matzke et al., Plant MoI Biol, 143) 323-32 1990), napA (Stalberg, et al., Planta 199: 515-519, 1996), Wheat SPA (Albanietal, Plant Cell, 9: 171-184, 1997), sunflower oleosin (Cummins, et al, Plant MoI. Biol. 19: 873-876, 1992)], endosperm specific promoters [e.g., wheat LMW and HMW, glutenin-1 (MoI Gen Genet 216:81-90, 1989; NAR 17:461-2), wheat a, b and g gliadins (EMBO3: 1409-15, 1984), Barley ltrl promoter, barley Bl, C, D hordein (Theor Appl Gen 98:1253-62, 1999; Plant J 4:343-55, 1993; MoI Gen Genet 250:750-60, 1996), Barley DOF (Mena et al., The Plant Journal, 116(1): 53-62, 1998), Biz2 (EP99106056.7), Synthetic promoter (Vicente-Carbajosa et al., Plant J. 13: 629-640, 1998), rice prolamin NRP33, rice-globulin GIb-I (Wu et al., Plant Cell Physiology 39(8) 885-889, 1998), rice alpha-globulin REB/OHP-1 (Nakase et al. Plant MoI. Biol. 33: 513-S22, 1997), rice ADP-glucose PP (Trans Res 6:157-68, 1997), maize ESR gene family (Plant J 12:235-46, 1997), sorghum gamma-kafirin (PMB 32:1029-35, 1996); e.g., the Napin promoter], embryo specific promoters [e.g., rice OSH1 (Sato et al, Proc. Natl. Acad. Sci. USA, 93: 8117-8122), KNOX (Postma-Haarsma et al, Plant MoI. Biol. 39:257-71, 1999), rice oleosin (Wu et at, J. Biochem., 123:386, 1998)], and flower-specific promoters [e.g., AtPRP4, chalene synthase (chsA) (Van der Meer, et al., Plant MoI. Biol. 15, 95-109, 1990), LAT52 (Twell et al., MoI. Gen Genet. 217:240-245; 1989), apetala-3]. Also contemplated are root-specific promoters such as the ROOTP promoter described in Vissenberg K, et al. Plant Cell Physiol. 2005 January; 46(1):192-200.

[0132] The nucleic acid construct of some embodiments of the invention can further include an appropriate selectable marker and/or an origin of replication.

[0133] The nucleic acid construct of some embodiments of the invention can be utilized to stably or transiently transform plant cells. In stable transformation, the exogenous polynucleotide is integrated into the plant genome and as such it represents a stable and inherited trait. In transient transformation, the exogenous polynucleotide is expressed by the cell transformed but it is not integrated into the genome and as such it represents a transient trait.

[0134] When naked RNA or DNA is introduced into a cell, the polynucleotides may be synthesized using any method known in the art, including either enzymatic syntheses or solid-phase syntheses. These are especially useful in the case of short polynucleotide sequences with or without modifications as explained above. Equipment and reagents for executing solid-phase synthesis are commercially available from, for example, Applied Biosystems. Any other means for such synthesis may also be employed; the actual synthesis of the oligonucleotides is well within the capabilities of one skilled in the art and can be accomplished via established methodologies as detailed in, for example: Sambrook, J. and Russell, D. W. (2001), “Molecular Cloning: A Laboratory Manual”; Ausubel, R. M. et al., eds. (1994, 1989), “Current Protocols in Molecular Biology,” Volumes I-III, John Wiley & Sons, Baltimore, Md.; Perbal, B. (1988), “A Practical Guide to Molecular Cloning,” John Wiley & Sons, New York; and Gait, M. J., ed. (1984), “Oligonucleotide Synthesis”; utilizing solid-phase chemistry, e.g. cyanoethyl phosphoramidite followed by deprotection, desalting, and purification by, for example, an automated trityl-on method or HPLC.

[0135] There are various methods of introducing foreign genes into both monocotyledonous and dicotyledonous plants (Potrykus, L, Annu. Rev. Plant. Physiol, Plant. MoI. Biol. (1991) 42:205-225; Shimamoto et al., Nature (1989) 338:274-276).

[0136] The principle methods of causing stable integration of exogenous DNA into plant genomic DNA include two main approaches:

[0137] (i) Agrobacterium-mediated gene transfer (e.g., T-DNA using Agrobacterium tumefaciens or Agrobacterium rhizogenes); see for example, Klee et al. (1987) Annu. Rev. Plant Physiol. 38:467-486; Klee and Rogers in Cell Culture and Somatic Cell Genetics of Plants, Vol. 6, Molecular Biology of Plant Nuclear Genes, eds. Schell, J., and Vasil, L. K., Academic Publishers, San Diego, Calif. (1989) p. 2-25; Gatenby, in Plant Biotechnology, eds. Kung, S, and Arntzen, C. J., Butterworth Publishers, Boston, Mass. (1989) p. 93-112.

[0138] (ii) Direct DNA uptake: Paszkowski et al., in Cell Culture and Somatic Cell Genetics of Plants, Vol. 6, Molecular Biology of Plant Nuclear Genes eds. Schell, J., and Vasil, L. K., Academic Publishers, San Diego, Calif. (1989) p. 52-68; including methods for direct uptake of DNA into protoplasts, Toriyama, K. et al. (1988) Bio/Technology 6:1072-1074. DNA uptake induced by brief electric shock of plant cells: Zhang et al. Plant Cell Rep. (1988) 7:379-384. Fromm et al. Nature (1986) 319:791-793. DNA injection into plant cells or tissues by particle bombardment, Klein et al. Bio/Technology (1988) 6:559-563; McCabe et al. Bio/Technology (1988) 6:923-926; Sanford, Physiol. Plant. (1990) 79:206-209; by the use of micropipette systems: Neuhaus et al., Theor. Appl. Genet. (1987) 75:30-36; Neuhaus and Spangenberg, Physiol. Plant. (1990) 79:213-217; glass fibers or silicon carbide whisker transformation of cell cultures, embryos or callus tissue, U.S. Pat. No. 5,464,765 or by the direct incubation of DNA with germinating pollen, DeWet et al. in Experimental Manipulation of Ovule Tissue, eds. Chapman, G. P. and Mantell, S. H. and Daniels, W. Longman, London, (1985) p. 197-209; and Ohta, Proc. Natl. Acad. Sci. USA (1986) 83:715-719.

[0139] The Agrobacterium system includes the use of plasmid vectors that contain defined DNA segments that integrate into the plant genomic DNA. Methods of inoculation of the plant tissue vary depending upon the plant species and the Agrobacterium delivery system. A widely used approach is the leaf disc procedure which can be performed with any tissue explant that provides a good source for initiation of whole plant differentiation. See, e.g., Horsch et al. in Plant Molecular Biology Manual A5, Kluwer Academic Publishers, Dordrecht (1988) p. 1-9. A supplementary approach employs the Agrobacterium delivery system in combination with vacuum infiltration. The Agrobacterium system is especially viable in the creation of transgenic dicotyledonous plants.

[0140] According to a specific embodiment of the present invention, the exogenous polynucleotide is introduced into the plant by infecting the plant with a bacteria, such as using a floral dip transformation method (as described in further detail in Example 6, of the Examples section which follows).

[0141] There are various methods of direct DNA transfer into plant cells. In electroporation, the protoplasts are briefly exposed to a strong electric field. In microinjection, the DNA is mechanically injected directly into the cells using very small micropipettes. In microparticle bombardment, the DNA is adsorbed on microprojectiles such as magnesium sulfate crystals or tungsten particles, and the microprojectiles are physically accelerated into cells or plant tissues.

[0142] Following stable transformation plant propagation is exercised. The most common method of plant propagation is by seed. Regeneration by seed propagation, however, has the deficiency that due to heterozygosity there is a lack of uniformity in the crop, since seeds are produced by plants according to the genetic variances governed by Mendelian rules. Basically, each seed is genetically different and each will grow with its own specific traits. Therefore, it is preferred that the transformed plant be produced such that the regenerated plant has the identical traits and characteristics of the parent transgenic plant. For this reason it is preferred that the transformed plant be regenerated by micropropagation which provides a rapid, consistent reproduction of the transformed plants.

[0143] Micropropagation is a process of growing new generation plants from a single piece of tissue that has been excised from a selected parent plant or cultivar. The new generation plants which are produced are genetically identical to, and have all of the characteristics of, the original plant. Micropropagation allows mass production of quality plant material in a short period of time and offers a rapid multiplication of selected cultivars in the preservation of the characteristics of the original transgenic or transformed plant. The advantages of cloning plants are the speed of plant multiplication and the quality and uniformity of plants produced.

[0144] Micropropagation is a multi-stage procedure that requires alteration of culture medium or growth conditions between stages. Thus, the micropropagation process involves four basic stages: Stage one, initial tissue culturing; stage two, tissue culture multiplication; stage three, differentiation and plant formation; and stage four, greenhouse culturing and hardening. During stage one, initial tissue culturing, the tissue culture is established and certified contaminant-free. During stage two, the initial tissue culture is multiplied until a sufficient number of tissue samples are produced to meet production goals. During stage three, the tissue samples grown in stage two are divided and grown into individual plantlets. At stage four, the transformed plantlets are transferred to a greenhouse for hardening where the plants' tolerance to light is gradually increased so that it can be grown in the natural environment.

[0145] Although stable transformation is presently preferred, transient transformation of leaf cells, meristematic cells or the whole plant is also envisaged by the present invention.

[0146] Transient transformation can be effected by any of the direct DNA transfer methods described above or by viral infection using modified plant viruses. Viruses that have been shown to be useful for the transformation of plant hosts include CaMV, Tobacco mosaic virus (TMV), brome mosaic virus (BMV) and Bean Common Mosaic Virus (BV or BCMV). Transformation of plants using plant viruses is described in U.S. Pat. No. 4,855,237 (bean golden mosaic virus; BGV), EP-A 67,553 (TMV), Japanese Published Application No. 63-14693 (TMV), EPA 194,809 (BV), EPA 278,667 (BV); and Gluzman, Y. et al., Communications in Molecular Biology: Viral Vectors, Cold Spring Harbor Laboratory, New York, pp. 172-189 (1988). Pseudovirus particles for use in expressing foreign DNA in many hosts, including plants are described in WO 87/06261. According to some embodiments of the invention, the virus used for transient transformations is avirulent and thus is incapable of causing severe symptoms such as reduced growth rate, mosaic, ring spots, leaf roll, yellowing, streaking, pox formation, tumor formation and pitting. A suitable avirulent virus may be a naturally occurring avirulent virus or an artificially attenuated virus. Virus attenuation may be effected by using methods well known in the art including, but not limited to, sub-lethal heating, chemical treatment or by directed mutagenesis techniques such as described, for example, by Kurihara and Watanabe (Molecular Plant Pathology 4:259-269, 2003), Galon et al. (1992), Atreya et al. (1992) and Huet et al. (1994).

[0147] Suitable virus strains can be obtained from available sources such as, for example, the American Type culture Collection (ATCC) or by isolation from infected plants. Isolation of viruses from infected plant tissues can be effected by techniques well known in the art such as described, for example by Foster and Tatlor, Eds. “Plant Virology Protocols: From Virus Isolation to Transgenic Resistance (Methods in Molecular Biology (Humana Pr), VoI 81)”, Humana Press, 1998. Briefly, tissues of an infected plant believed to contain a high concentration of a suitable virus, preferably young leaves and flower petals, are ground in a buffer solution (e.g., phosphate buffer solution) to produce a virus infected sap which can be used in subsequent inoculations.

[0148] Construction of plant RNA viruses for the introduction and expression of non-viral exogenous polynucleotide sequences in plants is demonstrated by the above references as well as by Dawson, W. O. et al, Virology (1989) 172:285-292; Takamatsu et al. EMBO J. (1987) 6:307-311; French et al. Science (1986) 231:1294-1297; Takamatsu et al. FEBS Letters (1990) 269:73-76; and U.S. Pat. No. 5,316,931.

[0149] When the virus is a DNA virus, suitable modifications can be made to the virus itself. Alternatively, the virus can first be cloned into a bacterial plasmid for ease of constructing the desired viral vector with the foreign DNA. The virus can then be excised from the plasmid. If the virus is a DNA virus, a bacterial origin of replication can be attached to the viral DNA, which is then replicated by the bacteria. Transcription and translation of this DNA will produce the coat proteins which will encapsidate the viral DNA. If the virus is an RNA virus, the virus is generally cloned as a cDNA and inserted into a plasmid. The plasmid is then used to make all of the constructions. The RNA virus is then produced by transcribing the viral sequence of the plasmid and translation of the viral genes to produce the coat protein(s) which encapsidate the viral RNA.

[0150] In one embodiment, a plant viral nucleic acid is provided in which the native coat protein coding sequence has been deleted from a viral nucleic acid, a non-native plant viral coat protein coding sequence and a non-native promoter, preferably the subgenomic promoter of the non-native coat protein coding sequence, capable of expression in the plant host, packaging of the recombinant plant viral nucleic acid, and ensuring a systemic infection of the host by the recombinant plant viral nucleic acid, has been inserted. Alternatively, the coat protein gene may be inactivated by insertion of the non-native nucleic acid sequence within it, such that a protein is produced. The recombinant plant viral nucleic acid may contain one or more additional non-native subgenomic promoters. Each non-native subgenomic promoter is capable of transcribing or expressing adjacent genes or nucleic acid sequences in the plant host and incapable of recombination with each other and with native subgenomic promoters. Non-native (foreign) nucleic acid sequences may be inserted adjacent the native plant viral subgenomic promoter or the native and a non-native plant viral subgenomic promoters if more than one nucleic acid sequence is included. The non-native nucleic acid sequences are transcribed or expressed in the host plant under control of the subgenomic promoter to produce the desired products.

[0151] In a second embodiment, a recombinant plant viral nucleic acid is provided as in the first embodiment except that the native coat protein coding sequence is placed adjacent one of the non-native coat protein subgenomic promoters instead of a non-native coat protein coding sequence.

[0152] In a third embodiment, a recombinant plant viral nucleic acid is provided in which the native coat protein gene is adjacent its subgenomic promoter and one or more non-native subgenomic promoters have been inserted into the viral nucleic acid. The inserted non-native subgenomic promoters are capable of transcribing or expressing adjacent genes in a plant host and are incapable of recombination with each other and with native subgenomic promoters. Non-native nucleic acid sequences may be inserted adjacent the non-native subgenomic plant viral promoters such that the sequences are transcribed or expressed in the host plant under control of the subgenomic promoters to produce the desired product.

[0153] In a fourth embodiment, a recombinant plant viral nucleic acid is provided as in the third embodiment except that the native coat protein coding sequence is replaced by a non-native coat protein coding sequence.

[0154] The viral vectors are encapsidated by the coat proteins encoded by the recombinant plant viral nucleic acid to produce a recombinant plant virus. The recombinant plant viral nucleic acid or recombinant plant virus is used to infect appropriate host plants. The recombinant plant viral nucleic acid is capable of replication in the host, systemic spread in the host, and transcription or expression of foreign gene(s) (isolated nucleic acid) in the host to produce the desired sequence.

[0155] In addition to the above, the nucleic acid molecule of the present invention can also be introduced into a chloroplast genome thereby enabling chloroplast expression.

[0156] A technique for introducing exogenous nucleic acid sequences to the genome of the chloroplasts is known. This technique involves the following procedures. First, plant cells are chemically treated so as to reduce the number of chloroplasts per cell to about one. Then, the exogenous nucleic acid is introduced via particle bombardment into the cells with the aim of introducing at least one exogenous nucleic acid molecule into the chloroplasts. The exogenous nucleic acid is selected such that it is integratable into the chloroplast's genome via homologous recombination which is readily effected by enzymes inherent to the chloroplast. To this end, the exogenous nucleic acid includes, in addition to a gene of interest, at least one nucleic acid stretch which is derived from the chloroplast's genome. In addition, the exogenous nucleic acid includes a selectable marker, which serves by sequential selection procedures to ascertain that all or substantially all of the copies of the chloroplast genomes following such selection will include the exogenous nucleic acid. Further details relating to this technique are found in U.S. Pat. Nos. 4,945,050; and 5,693,507 which are incorporated herein by reference.

[0157] Regardless of the method of transformation, propagation or regeneration, the present invention also contemplates a transgenic plant exogenously expressing the polynucleotide of the invention.

[0158] According to a specific embodiment, the transgenic plant exogenously expresses a polynucleotide having a nucleic acid sequence at least 90% identical to SEQ ID NOs: 1-56, 62, 63, 110, 116, 117, 119-161, 200, 201-255, 1027-1031, 1459-1836 (Tables 1, 3, 5), wherein the nucleic acid sequence is capable of regulating nitrogen use efficiency of the plant.

[0159] According to further embodiments, the exogenous polynucleotide encodes a precursor of the nucleic acid sequence.

[0160] According to yet further embodiments, the stem-loop precursor is at least 60% identical to SEQ ID NO: 256-259, 263, 264, 268-270, 272-309, 310-326, 1837-1841, 2269-2619, 2644-2658, 2691-2741 and 2793 (precursor sequences of Tables 1, 3 and 5). More specifically the exogenous polynucleotide is selected from the group consisting of SEQ ID NO: 1-56, 62, 63, 110, 116, 117, 119-161, 200, 201-255, 1027-1031, 1459-1836, 256-259, 263, 264, 268-270, 272-309, 310-326, 1837-1841, 2269-2619, 2644-2658, 2691-2741 and 2793.

[0161] Alternatively, there is provided a transgenic plant exogenously expressing a polynucleotide which downregulates an activity or expression of a gene encoding an RNAi molecule having a nucleic acid sequence selected from the group consisting of SEQ ID NOs: 57-61, 64-115, 118, 162-200, 260-262, 265-267, 271, 1032-1455, 1810-1827, 1842-2265, 2620-2643, 2742-2792 (Tables 2, 4, 6).

[0162] More specifically, the transgenic plant expresses the nucleic acid agent of Tables 13 and 14, e.g., the polynucleotides selected from the group consisting of SEQ ID NOs: 616-815 and 822-1025.

[0163] Also contemplated are hybrids of the above described transgenic plants. A “hybrid plant” refers to a plant or a part thereof resulting from a cross between two parent plants, wherein one parent is a genetically engineered plant of the invention (transgenic plant expressing an exogenous RNAi sequence or a precursor thereof). Such a cross can occur naturally by, for example, sexual reproduction, or artificially by, for example, in vitro nuclear fusion. Methods of plant breeding are well-known and within the level of one of ordinary skill in the art of plant biology.

[0164] Since nitrogen use efficiency, abiotic stress tolerance as well as yield, vigor or biomass of the plant can involve multiple genes acting additively or in synergy (see, for example, in Quesda et al., Plant Physiol. 130:951-063, 2002), the invention also envisages expressing a plurality of exogenous polynucleotides in a single host plant to thereby achieve superior effect on the efficiency of nitrogen use, yield, vigor and biomass of the plant.

[0165] Expressing a plurality of exogenous polynucleotides in a single host plant can be effected by co-introducing multiple nucleic acid constructs, each including a different exogenous polynucleotide, into a single plant cell. The transformed cell can then be regenerated into a mature plant using the methods described hereinabove. Alternatively, expressing a plurality of exogenous polynucleotides in a single host plant can be effected by co-introducing into a single plant-cell a single nucleic-acid construct including a plurality of different exogenous polynucleotides. Such a construct can be designed with a single promoter sequence which can transcribe a polycistronic messenger RNA including all the different exogenous polynucleotide sequences. Alternatively, the construct can include several promoter sequences each linked to a different exogenous polynucleotide sequence.

[0166] The plant cell transformed with the construct including a plurality of different exogenous polynucleotides can be regenerated into a mature plant, using the methods described hereinabove.

[0167] Alternatively, expressing a plurality of exogenous polynucleotides can be effected by introducing different nucleic acid constructs, including different exogenous polynucleotides, into a plurality of plants. The regenerated transformed plants can then be cross-bred and resultant progeny selected for superior yield or fiber traits as described above, using conventional plant breeding techniques.

[0168] Expression of the miRNAs/siRNAs of the present invention or precursors thereof can be qualified using methods which are well known in the art such as those involving gene amplification e.g., PCR or RT-PCR or Northern blot or in-situ hybridization.

[0169] According to some embodiments of the invention, the plant expressing the exogenous polynucleotide(s) is grown under stress (nitrogen or abiotic) or normal conditions (e.g., biotic conditions and/or conditions with sufficient water, nutrients such as nitrogen and fertilizer). Such conditions, which depend on the plant being grown, are known to those skilled in the art of agriculture, and are further, described above.

[0170] According to some embodiments of the invention, the method further comprises growing the plant expressing the exogenous polynucleotide(s) under abiotic stress or nitrogen limiting conditions. Non-limiting examples of abiotic stress conditions include, water deprivation, drought, excess of water (e.g., flood, waterlogging), freezing, low temperature, high temperature, strong winds, heavy metal toxicity, anaerobiosis, nutrient deficiency, nutrient excess, salinity, atmospheric pollution, intense light, insufficient light, or UV irradiation, etiolation and atmospheric pollution.

[0171] Thus, the invention encompasses plants exogenously expressing the polynucleotide(s), the nucleic acid constructs of the invention.

[0172] Methods of determining the level in the plant of the RNA transcribed from the exogenous polynucleotide are well known in the art and include, for example, Northern blot analysis, reverse transcription polymerase chain reaction (RT-PCR) analysis (including quantitative, semi-quantitative or real-time RT-PCR) and RNA-m situ hybridization.

[0173] The sequence information and annotations uncovered by the present teachings can be harnessed in favor of classical breeding. Thus, sub-sequence data of those polynucleotides described above, can be used as markers for marker assisted selection (MAS), in which a marker is used for indirect selection of a genetic determinant or determinants of a trait of interest (e.g., tolerance to abiotic stress). Nucleic acid data of the present teachings (DNA or RNA sequence) may contain or be linked to polymorphic sites or genetic markers on the genome such as restriction fragment length polymorphism (RFLP), microsatellites and single nucleotide polymorphism (SNP), DNA fingerprinting (DFP), amplified fragment length polymorphism (AFLP), expression level polymorphism, and any other polymorphism at the DNA or RNA sequence.

[0174] Examples of marker assisted selections include, but are not limited to, selection for a morphological trait (e.g., a gene that affects form, coloration, male sterility or resistance such as the presence or absence of awn, leaf sheath coloration, height, grain color, aroma of rice); selection for a biochemical trait (e.g., a gene that encodes a protein that can be extracted and observed; for example, isozymes and storage proteins); selection for a biological trait (e.g., pathogen races or insect biotypes based on host pathogen or host parasite interaction can be used as a marker since the genetic constitution of an organism can affect its susceptibility to pathogens or parasites).

[0175] The polynucleotides described hereinabove can be used in a wide range of economical plants, in a safe and cost effective manner.

[0176] Plant lines exogenously expressing the polynucleotide of the invention can be screened to identify those that show the greatest increase of the desired plant trait.

[0177] Thus, according to an additional embodiment of the present invention, there is provided a method of evaluating a trait of a plant, the method comprising: (a) expressing in a plant or a portion thereof the nucleic acid construct; and (b) evaluating a trait of a plant as compared to a wild type plant of the same type; thereby evaluating the trait of the plant.

[0178] Thus, the effect of the transgene (the exogenous polynucleotide) on different plant characteristics may be determined any method known to one of ordinary skill in the art.

[0179] Thus, for example, tolerance to limiting nitrogen conditions may be compared in transformed plants {i.e., expressing the transgene) compared to non-transformed (wild type) plants exposed to the same stress conditions (other stress conditions are contemplated as well, e.g. water deprivation, salt stress e.g. salinity, suboptimal temperature, osmotic stress, and the like), using the following assays.

[0180] Methods of qualifying plants as being tolerant or having improved tolerance to abiotic stress or limiting nitrogen levels are well known in the art and are further described hereinbelow.

[0181] Fertilizer use efficiency—To analyze whether the transgenic plants are more responsive to fertilizers, plants are grown in agar plates or pots with a limited amount of fertilizer, as described, for example, in Yanagisawa et al (Proc Natl Acad Sci USA. 2004; 101:7833-8). The plants are analyzed for their overall size, time to flowering, yield, protein content of shoot and/or grain. The parameters checked are the overall size of the mature plant, its wet and dry weight, the weight of the seeds yielded, the average seed size and the number of seeds produced per plant. Other parameters that may be tested are: the chlorophyll content of leaves (as nitrogen plant status and the degree of leaf verdure is highly correlated), amino acid and the total protein content of the seeds or other plant parts such as leaves or shoots, oil content, etc. Similarly, instead of providing nitrogen at limiting amounts, phosphate or potassium can be added at increasing concentrations. Again, the same parameters measured are the same as listed above. In this way, nitrogen use efficiency (NUE), phosphate use efficiency (PUE) and potassium use efficiency (KUE) are assessed, checking the ability of the transgenic plants to thrive under nutrient restraining conditions.

[0182] Nitrogen use efficiency—To analyze whether the transgenic plants (e.g., Arabidopsis plants) are more responsive to nitrogen, plant are grown in 0.75-3 millimolar (mM, nitrogen deficient conditions) or 6-10 mM (optimal nitrogen concentration). Plants are allowed to grow for additional 25 days or until seed production. The plants are then analyzed for their overall size, time to flowering, yield, protein content of shoot and/or grain/seed production. The parameters checked can be the overall size of the plant, wet and dry weight, the weight of the seeds yielded, the average seed size and the number of seeds produced per plant. Other parameters that may be tested are: the chlorophyll content of leaves (as nitrogen plant status and the degree of leaf greenness is highly correlated), amino acid and the total protein content of the seeds or other plant parts such as leaves or shoots and oil content. Transformed plants not exhibiting substantial physiological and/or morphological effects, or exhibiting higher measured parameters levels than wild-type plants, are identified as nitrogen use efficient plants.

[0183] Nitrogen Use efficiency assay using plantlets—The assay is done according to Yanagisawa-S. et al. with minor modifications (“Metabolic engineering with Dof1 transcription factor in plants: Improved nitrogen assimilation and growth under low-nitrogen conditions” Proc. Natl. Acad. Sci. USA 101, 7833-7838). Briefly, transgenic plants which are grown for 7-10 days in 0.5×MS [Murashige-Skoog] supplemented with a selection agent are transferred to two nitrogen-limiting conditions: MS media in which the combined nitrogen concentration (NH₄NO₃ and KNO₃) was 0.75 mM (nitrogen deficient conditions) or 6-15 mM (optimal nitrogen concentration). Plants are allowed to grow for additional 30-40 days and then photographed, individually removed from the Agar (the shoot without the roots) and immediately weighed (fresh weight) for later statistical analysis. Constructs for which only T1 seeds are available are sown on selective media and at least 20 seedlings (each one representing an independent transformation event) are carefully transferred to the nitrogen-limiting media. For constructs for which T2 seeds are available, different transformation events are analyzed. Usually, 20 randomly selected plants from each event are transferred to the nitrogen-limiting media allowed to grow for 3-4 additional weeks and individually weighed at the end of that period. Transgenic plants are compared to control plants grown in parallel under the same conditions. Mock-transgenic plants expressing the uidA reporter gene (GUS) under the same promoter or transgenic plants carrying the same promoter but lacking a reporter gene are used as control.

[0184] Nitrogen determination—The procedure for N (nitrogen) concentration determination in the structural parts of the plants involves the potassium persulfate digestion method to convert organic N to NO₃⁻ (Purcell and King 1996 Argon. J. 88:111-113, the modified Cd⁻ mediated reduction of NO₃⁻ to NO₂⁻ (Vodovotz 1996 Biotechniques 20:390-394) and the measurement of nitrite by the Griess assay (Vodovotz 1996, supra). The absorbance values are measured at 550 nm against a standard curve of NaNO₂. The procedure is described in details in Samonte et al. 2006 Agron. J. 98:168-176.

[0185] Tolerance to abiotic stress (e.g. tolerance to drought or salinity) can be evaluated by determining the differences in physiological and/or physical condition, including but not limited to, vigor, growth, size, or root length, or specifically, leaf color or leaf area size of the transgenic plant compared to a non-modified plant of the same species grown under the same conditions. Other techniques for evaluating tolerance to abiotic stress include, but are not limited to, measuring chlorophyll fluorescence, photosynthetic rates and gas exchange rates. Further assays for evaluating tolerance to abiotic stress are provided hereinbelow and in the Examples section which follows.

[0186] Drought tolerance assay—Soil-based drought screens are performed with plants overexpressing the polynucleotides detailed above. Seeds from control Arabidopsis plants, or other transgenic plants overexpressing nucleic acid of the invention are germinated and transferred to pots. Drought stress is obtained after irrigation is ceased. Transgenic and control plants are compared to each other when the majority of the control plants develop severe wilting. Plants are re-watered after obtaining a significant fraction of the control plants displaying a severe wilting. Plants are ranked comparing to controls for each of two criteria: tolerance to the drought conditions and recovery (survival) following re-watering.

[0187] Quantitative parameters of tolerance measured include, but are not limited to, the average wet and dry weight, growth rate, leaf size, leaf coverage (overall leaf area), the weight of the seeds yielded, the average seed size and the number of seeds produced per plant. Transformed plants not exhibiting substantial physiological and/or morphological effects, or exhibiting higher biomass than wild-type plants, are identified as drought stress tolerant plants

[0188] Salinity tolerance assay—Transgenic plants with tolerance to high salt concentrations are expected to exhibit better germination, seedling vigor or growth in high salt. Salt stress can be effected in many ways such as, for example, by irrigating the plants with a hyperosmotic solution, by cultivating the plants hydroponically in a hyperosmotic growth solution (e.g., Hoagland solution with added salt), or by culturing the plants in a hyperosmotic growth medium [e.g., 50% Murashige-Skoog medium (MS medium) with added salt]. Since different plants vary considerably in their tolerance to salinity, the salt concentration in the irrigation water, growth solution, or growth medium can be adjusted according to the specific characteristics of the specific plant cultivar or variety, so as to inflict a mild or moderate effect on the physiology and/or morphology of the plants (for guidelines as to appropriate concentration see, Bernstein and Kafkafi, Root Growth Under Salinity Stress In: Plant Roots, The Hidden Half 3rd ed. Waisel Y, Eshel A and Kafkafi U. (editors) Marcel Dekker Inc., New York, 2002, and reference therein).

[0189] For example, a salinity tolerance test can be performed by irrigating plants at different developmental stages with increasing concentrations of sodium chloride (for example 50 mM, 150 mM, 300 mM NaCl) applied from the bottom and from above to ensure even dispersal of salt. Following exposure to the stress condition the plants are frequently monitored until substantial physiological and/or morphological effects appear in wild type plants. Thus, the external phenotypic appearance, degree of chlorosis and overall success to reach maturity and yield progeny are compared between control and transgenic plants. Quantitative parameters of tolerance measured include, but are not limited to, the average wet and dry weight, growth rate, leaf size, leaf coverage (overall leaf area), the weight of the seeds yielded, the average seed size and the number of seeds produced per plant. Transformed plants not exhibiting substantial physiological and/or morphological effects, or exhibiting higher biomass than wild-type plants, are identified as abiotic stress tolerant plants.

[0190] Osmotic tolerance test—Osmotic stress assays (including sodium chloride and PEG assays) are conducted to determine if an osmotic stress phenotype was sodium chloride-specific or if it was a general osmotic stress related phenotype. Plants which are tolerant to osmotic stress may have more tolerance to drought and/or freezing. For salt and osmotic stress experiments, the medium is supplemented for example with 50 mM, 100 mM, 200 mM NaCl or 15%, 20% or 25% PEG.

[0191] Cold stress tolerance—One way to analyze cold stress is as follows. Mature (25 day old) plants are transferred to 4° C. chambers for 1 or 2 weeks, with constitutive light. Later on plants are moved back to greenhouse. Two weeks later damages from chilling period, resulting in growth retardation and other phenotypes, are compared between control and transgenic plants, by measuring plant weight (wet and dry), and by comparing growth rates measured as time to flowering, plant size, yield, and the like.

[0192] Heat stress tolerance—One way to measure heat stress tolerance is by exposing the plants to temperatures above 34° C. for a certain period. Plant tolerance is examined after transferring the plants back to 22° C. for recovery and evaluation after 5 days relative to internal controls (non-transgenic plants) or plants not exposed to neither cold or heat stress.

[0193] The biomass, vigor and yield of the plant can also be evaluated using any method known to one of ordinary skill in the art. Thus, for example, plant vigor can be calculated by the increase in growth parameters such as leaf area, fiber length, rosette diameter, plant fresh weight and the like per time.

[0194] As mentioned, the increase of plant yield can be determined by various parameters. For example, increased yield of rice may be manifested by an increase in one or more of the following: number of plants per growing area, number of panicles per plant, number of spikelets per panicle, number of flowers per panicle, increase in the seed filling rate, increase in thousand kernel weight (1000-weight), increase oil content per seed, increase starch content per seed, among others. An increase in yield may also result in modified architecture, or may occur because of modified architecture. Similarly, increased yield of soybean may be manifested by an increase in one or more of the following: number of plants per growing area, number of pods per plant, number of seeds per pod, increase in the seed filling rate, increase in thousand seed weight (1000-weight), reduce pod shattering, increase oil content per seed, increase protein content per seed, among others. An increase in yield may also result in modified architecture, or may occur because of modified architecture.

[0195] Thus, the present invention is of high agricultural value for increasing tolerance of plants to nitrogen deficiency or abiotic stress as well as promoting the yield, biomass and vigor of commercially desired crops.

[0196] According to another embodiment of the present invention, there is provided a food or feed comprising the plants or a portion thereof of the present invention.

[0197] In a further aspect the invention, the transgenic plants of the present invention or parts thereof are comprised in a food or feed product (e.g., dry, liquid, paste). A food or feed product is any ingestible preparation containing the transgenic plants, or parts thereof, of the present invention, or preparations made from these plants. Thus, the plants or preparations are suitable for human (or animal) consumption, i.e. the transgenic plants or parts thereof are more readily digested. Feed products of the present invention further include a oil or a beverage adapted for animal consumption.

[0198] It will be appreciated that the transgenic plants, or parts thereof, of the present invention may be used directly as feed products or alternatively may be incorporated or mixed with feed products for consumption. Furthermore, the food or feed products may be processed or used as is. Exemplary feed products comprising the transgenic plants, or parts thereof, include, but are not limited to, grains, cereals, such as oats, e.g. black oats, barley, wheat, rye, sorghum, corn, vegetables, leguminous plants, especially soybeans, root vegetables and cabbage, or green forage, such as grass or hay.

[0199] As used herein the term “about” refers to ±10%.

[0200] The terms “comprises”, “comprising”, “includes”, “including”, “having” and their conjugates mean “including but not limited to”.

[0201] The term “consisting of means “including and limited to”.

[0202] The term “consisting essentially of” means that the composition, method or structure may include additional ingredients, steps and/or parts, but only if the additional ingredients, steps and/or parts do not materially alter the basic and novel characteristics of the claimed composition, method or structure.

[0203] As used herein, the singular form “a”, “an” and “the” include plural references unless the context clearly dictates otherwise. For example, the term “a compound” or “at least one compound” may include a plurality of compounds, including mixtures thereof.

[0204] Throughout this application, various embodiments of this invention may be presented in a range format. It should be understood that the description in range format is merely for convenience and brevity and should not be construed as an inflexible limitation on the scope of the invention. Accordingly, the description of a range should be considered to have specifically disclosed all the possible subranges as well as individual numerical values within that range. For example, description of a range such as from 1 to 6 should be considered to have specifically disclosed subranges such as from 1 to 3, from 1 to 4, from 1 to 5, from 2 to 4, from 2 to 6, from 3 to 6 etc., as well as individual numbers within that range, for example, 1, 2, 3, 4, 5, and 6.

[0205] Whenever a numerical range is indicated herein, it is meant to include any cited numeral (fractional or integral) within the indicated range. The phrases “ranging/ranges between” a first indicate number and a second indicate number and “ranging/ranges from” a first indicate number “to” a second indicate number are used herein interchangeably and are meant to include the first and second indicated numbers and all the fractional and integral numerals therebetween.

[0206] As used herein the term “method” refers to manners, means, techniques and procedures for accomplishing a given task including, but not limited to, those manners, means, techniques and procedures either known to, or readily developed from known manners, means, techniques and procedures by practitioners of the chemical, pharmacological, biological, biochemical and medical arts.

[0207] As used herein, the term “treating” includes abrogating, substantially inhibiting, slowing or reversing the progression of a condition, substantially ameliorating clinical or aesthetical symptoms of a condition or substantially preventing the appearance of clinical or aesthetical symptoms of a condition.

[0208] It is appreciated that certain features of the invention, which are, for clarity, described in the context of separate embodiments, may also be provided in combination in a single embodiment. Conversely, various features of the invention, which are, for brevity, described in the context of a single embodiment, may also be provided separately or in any suitable subcombination or as suitable in any other described embodiment of the invention. Certain features described in the context of various embodiments are not to be considered essential features of those embodiments, unless the embodiment is inoperative without those elements.

[0209] Various embodiments and aspects of the present invention as delineated hereinabove and as claimed in the claims section below find experimental support in the following examples.

### EXAMPLES

[0210] Reference is now made to the following examples, which together with the above descriptions illustrate some embodiments of the invention in a non limiting fashion.

[0211] Generally, the nomenclature used herein and the laboratory procedures utilized in the present invention include molecular, biochemical, microbiological and recombinant DNA techniques. Such techniques are thoroughly explained in the literature. See, for example, “Molecular Cloning: A laboratory Manual” Sambrook et al., (1989); “Current Protocols in Molecular Biology” Volumes I-III Ausubel, R. M., ed. (1994); Ausubel et al., “Current Protocols in Molecular Biology”, John Wiley and Sons, Baltimore, Md. (1989); Perbal, “A Practical Guide to Molecular Cloning”, John Wiley & Sons, New York (1988); Watson et al., “Recombinant DNA”, Scientific American Books, New York; Birren et al. (eds) “Genome Analysis: A Laboratory Manual Series”, Vols. 1-4, Cold Spring Harbor Laboratory Press, New York (1998); methodologies as set forth in U.S. Pat. Nos. 4,666,828; 4,683,202; 4,801,531; 5,192,659 and 5,272,057; “Cell Biology: A Laboratory Handbook”, Volumes I-III Cellis, J. E., ed. (1994); “Current Protocols in Immunology” Volumes I-III Coligan J. E., ed. (1994); Stites et al. (eds), “Basic and Clinical Immunology” (8th Edition), Appleton & Lange, Norwalk, Conn. (1994); Mishell and Shiigi (eds), “Selected Methods in Cellular Immunology”, W. H. Freeman and Co., New York (1980); available immunoassays are extensively described in the patent and scientific literature, see, for example, U.S. Pat. Nos. 3,791,932; 3,839,153; 3,850,752; 3,850,578; 3,853,987; 3,867,517; 3,879,262; 3,901,654; 3,935,074; 3,984,533; 3,996,345; 4,034,074; 4,098,876; 4,879,219; 5,011,771 and 5,281,521; “Oligonucleotide Synthesis” Gait, M. J., ed. (1984); “Nucleic Acid Hybridization” Hames, B. D., and Higgins S. J., eds. (1985); “Transcription and Translation” Hames, B. D., and Higgins S. J., Eds. (1984); “Animal Cell Culture” Freshney, R. I., ed. (1986); “Immobilized Cells and Enzymes” IRL Press, (1986); “A Practical Guide to Molecular Cloning” Perbal, B., (1984) and “Methods in Enzymology” Vol. 1-317, Academic Press; “PCR Protocols: A Guide To Methods And Applications”, Academic Press, San Diego, Calif. (1990); Marshak et al., “Strategies for Protein Purification and Characterization—A Laboratory Course Manual” CSHL Press (1996); all of which are incorporated by reference as if fully set forth herein. Other general references are provided throughout this document. The procedures therein are believed to be well known in the art and are provided for the convenience of the reader. All the information contained therein is incorporated herein by reference.

### Example 1

### Differential Expression of dsRNAs in Maize Plant Under Optimal Versus Deficient Nitrogen Conditions

[0212] Experimental Procedures

[0213] Plant Material

[0214] Corn seeds were obtained from Galil seeds (Israel). Corn variety 5605 or GSO308 were used in all experiments. Plants were grown at 24° C. under a 16 hours (hr) light: 8 hr dark regime.

[0215] Stress Induction

[0216] Corn seeds were germinated and grown on agar with defined growth media containing either optimal (100% N₂, 20.61 mM) or suboptimal nitrogen levels (1% or 10% N₂, 0.2 mM or 2.06 mM, respectively). Seedlings aged one or two weeks were used for tissue samples for RNA analysis, as described below.

[0217] Total RNA Extraction

[0218] Total RNA of leaf or root samples from four to eight biological repeats were extracted using the mirVana™ kit (Ambion, Austin, Tex.) by pooling 3-4 plants to one biological repeat.

[0219] Microarray Design

[0220] Custom microarrays were manufactured by Agilent Technologies by in situ synthesis. The first generation microarray consisted of a total of 13619 non-redundant DNA probes, the majority of which arose from deep sequencing data and includes different small RNA molecules (i.e. miRNAs, siRNA and predicted small RNA sequences), with each probe being printed once. An in-depth analysis of the first generation microarray, which included hybridization experiments as well as structure and orientation verifications on all its small RNAs, resulted in the formation of an improved, second generation, microarray. The second generation microarray consists of a total 4721 non-redundant DNA 45-nucleotide long probes for all known plant small RNAs, with 912 sequences (19.32%) from Sanger version 15 and the rest (3809), encompassing miRNAs (968=20.5%), siRNAs (1626=34.44%) and predicted small RNA sequences (1215=25.74%), from deep sequencing data accumulated by the inventors, with each probe being printed in triplicate.

[0221] Results

[0222] Wild type maize plants were allowed to grow at standard, optimal conditions or nitrogen deficient conditions for one or two weeks, at the end of which they were evaluated for NUE. Three to four plants from each group were used for reproducibility. Four to eight repeats were obtained for each group and RNA was extracted from leaf or root tissue. The expression level of the maize miRNAs was analyzed by high throughput microarray to identify miRNAs that were differentially expressed between the experimental groups.

[0223] Tables 1-4 below present dsRNA sequences that were found to be differentially expressed (upregulated=up; downregulated=down) in corn grown under low nitrogen conditions (nitrogen limiting conditions, as described above).

TABLE 1
miRNAs Found to be Upregulated in Plants Growing under Nitrogen
Deficient versus Optimal Conditions

| | | Stem | | | |
|---|---|---|---|---|---|
| | | Loop | | | |
| | | Sequence/ | | Fold | Fold |
| | Mature | SEQ | | Change | Change |
| Mir Name | SEQ ID NO: | ID NO: | Direction | Leaf | Root |
| Predicted zma mir | CCAAGTCGAGGGC | 2691 | Up | | 1.95 |
| 48879 | AGACCAGGC/1 | | | | |
| Predicted zma mir | AGGATGCTGACGC | 2692 | Up | 1.72 | 1.8 |
| 48486 | AATGGGAT/2 | | | | |
| Predicted folded 24- | GTCAAGTGACTAA | 2693 | Up | 4.93 | 10.17 |
| nts-long seq 52850 | GAGCATGTGGT/3 | | | | |
| osa-miR1430 | TGGTGAGCCTTCCT | 256 | Up | | 3.99 |
| | GGCTAAG/4 | | | | |
| osa-miR1868 | TCACGGAAAACGA | 257 | Up | | 2.63 |
| | GGGAGCAGCCA/5 | | | | |
| osa-miR2096-3p | CCTGAGGGGAAAT | 258 | Up | 3.48 | 2.71 |
| | CGGCGGGA/6 | | | | |
| zma-miR399f* | GGGCAACTTCTCCT | 259 | Up | | 2.13 |
| | TTGGCAGA/7 | | | | |
| Predicted folded 24- | AACTAAAACGAAA | 2694 | Up | 2.1 | |
| nts-long seq 50935 | CGGAAGGAGTA/8 | | | | |
| Predicted folded 24- | AAGGTGCTTTTAG | 2695 | Up | 2.08 | |
| nts-long seq 51052 | GAGTAGGACGG/9 | | | | |
| Predicted folded 24- | ACAAAGGAATTAG | 2696 | Up | 3.23 | 2.49 |
| nts-long seq 51215 | AACGGAATGGC/10 | | | | |
| Predicted folded 24- | AGAATCAGGAATG | 2697 | Up | | 1.54 |
| nts-long seq 51468 | GAACGGCTCCG/11 | | | | |
| Predicted folded 24- | AGAATCAGGGATG | 2698 | Up | | 1.9 |
| nts-long seq 51469 | GAACGGCTCTA/12 | | | | |
| Predicted folded 24- | AGAGTCACGGGCG | 2699 | Up | | 2.34 |
| nts-long seq 51577 | AGAAGAGGACG/13 | | | | |
| Predicted folded 24- | AGGACCTAGATGA | 2700 | Up | | 1.72 |
| nts-long seq 51691 | GCGGGCGGTTT/14 | | | | |
| Predicted folded 24- | AGGACGCTGCTGG | 2701 | Up | | 2.4 |
| nts-long seq 51695 | AGACGGAGAAT/15 | | | | |
| Predicted folded 24- | AGGGCTTGTTCGG | 2702 | Up | 2.52 | |
| nts-long seq 51814 | TTTGAAGGGGT/16 | | | | |
| Predicted folded 24- | ATCTTTCAACGGCT | 2703 | Up | | 2.11 |
| nts-long seq 52057 | GCGAAGAAGG/17 | | | | |
| Predicted folded 24- | CTAGAATTAGGGA | 2704 | Up | | 1.57 |
| nts-long seq 52327 | TGGAACGGCTC/18 | | | | |
| Predicted folded 24- | GAGGGATAACTGG | 2705 | Up | 2.97 | |
| nts-long seq 52499 | GGACAACACGG/19 | | | | |
| Predicted folded 24- | GCGGAGTGGGATG | 2706 | Up | | 1.51 |
| nts-long seq 52633 | GGGAGTGTTGC/20 | | | | |
| Predicted folded 24- | GGAGACGGATGCG | 2707 | Up | | 1.51 |
| nts-long seq 52688 | GAGACTGCTGG/21 | | | | |
| Predicted folded 24- | GGTTAGGAGTGGA | 2708 | Up | 3.77 | |
| nts-long seq 52805 | TTGAGGGGGAT/22 | | | | |
| Predicted folded 24- | GTCAAGTGACTAA | 2709 | Up | 4.93 | 10.17 |
| nts-long seq 52850 | GAGCATGTGGT/23 | | | | |
| Predicted folded 24- | GTGGAATGGAGGA | 2710 | Up | 2.01 | |
| nts-long seq 52882 | GATTGAGGGGA/24 | | | | |
| Predicted folded 24- | TGGCTGAAGGCAG | 2711 | Up | | 4.45 |
| nts-long seq 53118 | AACCAGGGGAG/25 | | | | |
| Predicted folded 24- | TGTGGTAGAGAGG | 2712 | Up | 3.25 | |
| nts-long seq 53149 | AAGAACAGGAC/26 | | | | |
| Predicted folded 24- | AGGGACTCTCTTTA | 2713 | Up | 1.83 | |
| nts-long seq 53594 | TTTCCGACGG/27 | | | | |
| Predicted folded 24- | AGGGTTCGTTTCCT | 2714 | Up | | 1.66 |
| nts-long seq 53604 | GGGAGCGCGG/28 | | | | |
| Predicted folded 24- | TCCTAGAATCAGG | 2715 | Up | | 1.6 |
| nts-long seq 54081 | GATGGAACGGC/29 | | | | |
| Predicted folded 24- | TGGGAGCTCTCTGT | 2716 | Up | 3.47 | |
| nts-long seq 54132 | TCGATGGCGC/30 | | | | |
| Predicted zma mir | AACGTCGTGTCGT | 2717 | Up | | 1.62 |
| 48061 | GCTTGGGCT/31 | | | | |
| Predicted zma mir | ACCTGGACCAATA | 2718 | Up | 2.58 | |
| 48295 | CATGAGATT/32 | | | | |
| Predicted zma mir | AGAAGCGACAATG | 2719 | Up | 4.65 | |
| 48350 | GGACGGAGT/33 | | | | |
| Predicted zma mir | AGGAAGGAACAAA | 2720 | Up | | 2.08 |
| 48457 | CGAGGATAAG/34 | | | | |
| Predicted zma mir | CCAAGAGATGGAA | 2721 | Up | 2 | |
| 48877 | GGGCAGAGC/35 | | | | |
| Predicted zma mir | CGACAACGGGACG | 2722 | Up | | 1.58 |
| 48922 | GAGTTCAA/36 | | | | |
| Predicted zma mir | GAGGATGGAGAGG | 2723 | Up | 2.02 | |
| 49123 | TACGTCAGA/37 | | | | |
| Predicted zma mir | GATGGGTAGGAGA | 2724 | Up | 1.51 | 1.55 |
| 49161 | GCGTCGTGTG/38 | | | | |
| Predicted zma mir | GATGGTTCATAGG | 2725 | Up | | 4.2 |
| 49162 | TGACGGTAG/39 | | | | |
| Predicted zma mir | GGGAGCCGAGACA | 2726 | Up | | 2.64 |
| 49262 | TAGAGATGT/40 | | | | |
| Predicted zma mir | GTGAGGAGTGATA | 2727 | Up | | 2.17 |
| 49323 | ATGAGACGG/41 | | | | |
| Predicted zma mir | GTTTGGGGCTTTAG | 2728 | Up | 1.58 | |
| 49369 | CAGGTTTAT/42 | | | | |
| Predicted zma mir | TCCATAGCTGGGC | 2729 | Up | | 5.52 |
| 49609 | GGAAGAGAT/43 | | | | |
| Predicted zma mir | TCGGCATGTGTAG | 2730 | Up | 3.24 ± 1.00 | 3.235 ± 0.205 |
| 49638 | GATAGGTG/44 | | | | |
| Predicted zma mir | TGATAGGCTGGGT | 2731 | Up | 2.01 | 1.73 |
| 49761 | GTGGAAGCG/45 | | | | |
| Predicted zma mir | TGCAAACAGACTG | 2732 | Up | | 3 |
| 49787 | GGGAGGCGA/46 | | | | |
| Predicted zma mir | TTTGGCTGACAGG | 2733 | Up | 2.44 | |
| 50077 | ATAAGGGAG/47 | | | | |
| Predicted zma mir | TTTTCATAGCTGGG | 2734 | Up | 19.94 | |
| 50095 | CGGAAGAG/48 | | | | |
| Predicted zma mir | AACTTTAAATAGG | 2793 | Up | | 1.51 |
| 50110 | TAGGACGGCGC/49 | | | | |
| Predicted zma mir | GGAATGTTGTCTG | 2735 | Up | 14.34 | |
| 50204 | GTTCAAGG/50 | | | | |
| Predicted zma mir | TGTAATGTTCGCG | 2736 | Up | | 1.7 |
| 50261 | GAAGGCCAC/51 | | | | |
| Predicted zma mir | TGTTGGCATGGCTC | 2737 | Up | | 1.82 |
| 50267 | AATCAAC/52 | | | | |
| Predicted zma mir | CGCTGACGCCGTG | 2738 | Up | | 2.33 |
| 50460 | CCACCTCAT/53 | | | | |
| Predicted zma mir | GCCTGGGCCTCTTT | 2739 | Up | | 1.5 |
| 50545 | AGACCT/54 | | | | |
| Predicted zma mir | GTAGGATGGATGG | 2740 | Up | | 2.07 |
| 50578 | AGAGGGTTC/55 | | | | |
| Predicted zma mir | TCAACGGGCTGGC | 2741 | up | | 1.55 |
| 50611 | GGATGTG/56 | | | | |

Table 1. Provided are the sequence information and annotation of the miRNAs which are upregulated in plants grown under Nitrogen-deficient conditions versus optimal Nitrogen conditions.

TABLE 2
miRNAs Found to be Downregulated in Plants Growing under Nitrogen
Deficient versus Optimal Conditions

| | | Stem | | | |
|---|---|---|---|---|---|
| | | Loop | | | |
| | | Sequence/ | | Fold | Fold |
| | Mature Sequence/SEQ ID | SEQ | | Change | Change |
| Mir Name | NO: | ID NO: | Direction | Leaf | Root |
| Predicted zma mir | TAGCCAAGCATGATTT | 2742 | Down | 2.51 | 1.66 |
| 50601 | GCCCG/57 | | | | |
| aqc-miR529 | AGAAGAGAGAGAGCA | 260 | Down | 1.53 | |
| | CAACCC/58 | | | | |
| ath-miR2936 | CTTGAGAGAGAGAACA | 261 | Down | 1.54 | |
| | CAGACG/59 | | | | |
| Predicted zma mir | AGGATGTGAGGCTATT | 2743 | Down | | 2.75 |
| 48492 | GGGGAC/60 | | | | |
| mtr-miR169q | TGAGCCAGGATGACTT | 262 | Down | 3.04 | |
| | GCCGG/61 | | | | |
| peu-miR2911 | GGCCGGGGGACGGGCT | 265 | Down | 1.66 | |
| | GGGA/64 | | | | |
| Predicted folded 24- | AAAAAAGACTGAGCCG | 2744 | Down | | 2.66 |
| nts-long seq 50703 | AATTGAAA/65 | | | | |
| Predicted folded 24- | AAGGAGTTTAATGAAG | 2745 | Down | 1.62 | |
| nts-long seq 51022 | AAAGAGAG/66 | | | | |
| Predicted folded 24- | ACTGATGACGACACTG | 2746 | Down | 7.7 | |
| nts-long seq 51381 | AGGAGGCT/67 | | | | |
| Predicted folded 24- | AGAGGAACCAGAGCCG | 2747 | Down | 1.52 | |
| nts-long seq 51542 | AAGCCGTT/68 | | | | |
| Predicted folded 24- | AGGCAAGGTGGAGGAC | 2748 | Down | 2.07 | |
| nts-long seq 51757 | GTTGATGA/69 | | | | |
| Predicted folded 24- | AGGGCTGATTTGGTGA | 2749 | Down | 3.7 | 2.04 |
| nts-long seq 51802 | CAAGGGGA/70 | | | | |
| Predicted folded 24- | ATATAAAGGGAGGAGG | 2750 | Down | 2.1 | |
| nts-long seq 51966 | TATGGACC/71 | | | | |
| Predicted folded 24- | ATCGGTCAGCTGGAGG | 2751 | Down | 1.7 | |
| nts-long seq 52041 | AGACAGGT/72 | | | | |
| Predicted folded 24- | ATGGTAAGAGACTATG | 2752 | Down | | 1.62 |
| nts-long seq 52109 | ATCCAACT/73 | | | | |
| Predicted folded 24- | CAATTTTGTACTGGATC | 2753 | Down | | 1.53 |
| nts-long seq 52212 | GGGGCAT/74 | | | | |
| Predicted folded 24- | CAGAGGAACCAGAGCC | 2754 | Down | 1.58 | |
| nts-long seq 52218 | GAAGCCGT/75 | | | | |
| Predicted folded 24- | CGGCTGGACAGGGAAG | 2755 | Down | 1.63 | |
| nts-long seq 52299 | AAGAGCAC/76 | | | | |
| Predicted folded 24- | GAAACTTGGAGAGATG | 2756 | Down | | 1.7 |
| nts-long seq 52347 | GAGGCTTT/77 | | | | |
| Predicted folded 24- | GAGAGAGAAGGGAGC | 2757 | Down | 3.25 | 2.52 |
| nts-long seq 52452 | GGATCTGGT/78 | | | | |
| Predicted folded 24- | GCTGCACGGGATTGGT | 2758 | Down | 2.34 | |
| nts-long seq 52648 | GGAGAGGT/79 | | | | |
| Predicted folded 24- | GGCTGCTGGAGAGCGT | 2759 | Down | 2.13 | |
| nts-long seq 52739 | AGAGGACC/80 | | | | |
| Predicted folded 24- | GGGTTTTGAGAGCGAG | 2760 | Down | | 2.9 |
| nts-long seq 52792 | TGAAGGGG/81 | | | | |
| Predicted folded 24- | GGTATTGGGGTGGATT | 2761 | Down | 1.59 | |
| nts-long seq 52795 | GAGGTGGA/82 | | | | |
| Predicted folded 24- | GGTGGCGATGCAAGAG | 2762 | Down | 2.52 | 3.87 |
| nts-long seq 52801 | GAGCTCAA/83 | | | | |
| Predicted folded 24- | GTTGCTGGAGAGAGTA | 2763 | Down | | 2.35 |
| nts-long seq 52955 | GAGGACGT/84 | | | | |
| Predicted zma mir | AAAAGAGAAACCGAA | 2764 | Down | | 1.78 |
| 47944 | GACACAT/85 | | | | |
| Predicted zma mir | AAAGAGGATGAGGAGT | 2765 | Down | 4.09 | |
| 47976 | AGCATG/86 | | | | |
| Predicted zma mir | AATACACATGGGTTGA | 2766 | Down | 1.85 | |
| 48185 | GGAGG/87 | | | | |
| Predicted zma mir | AGAAGCGGACTGCCAA | 2767 | Down | 3.18 | |
| 48351 | GGAGGC/88 | | | | |
| Predicted zma mir | AGAGGGTTTGGGGATA | 2768 | Down | | 8.95 |
| 48397 | GAGGGAC/89 | | | | |
| Predicted zma mir | ATAGGGATGAGGCAGA | 2769 | Down | | 2.1 |
| 48588 | GCATG/90 | | | | |
| Predicted zma mir | ATGCTATTTGTACCCGT | 2770 | Down | | 1.67 |
| 48669 | CACCG/91 | | | | |
| Predicted zma mir | ATGTGGATAAAAGGAG | 2771 | Down | | 1.61 |
| 48708 | GGATGA/92 | | | | |
| Predicted zma mir | CAACAGGAACAAGGAG | 2772 | Down | 1.52 | |
| 48771 | GACCAT/93 | | | | |
| Predicted zma mir | CTGAGTTGAGAAAGAG | 2773 | Down | | 1.51 |
| 49002 | ATGCT/94 | | | | |
| Predicted zma mir | CTGATGGGAGGTGGAG | 2774 | Down | 1.61 | |
| 49003 | TTGCAT/95 | | | | |
| Predicted zma mir | CTGGGAAGATGGAACA | 2775 | Down | | 1.64 |
| 49011 | TTTTGGT/96 | | | | |
| Predicted zma mir | GAAGATATACGATGAT | 2776 | Down | 1.55 | |
| 49053 | GAGGAG/97 | | | | |
| Predicted zma mir | GAATCTATCGTTTGGG | 2777 | Down | 1.65 | 2.01 |
| 49070 | CTCAT/98 | | | | |
| Predicted zma mir | GACGAGCTACAAAAGG | 2778 | Down | 1.6 | |
| 49082 | ATTCG/99 | | | | |
| Predicted zma mir | GATGACGAGGAGTGAG | 2779 | Down | | 3.64 |
| 49155 | AGTAGG/100 | | | | |
| Predicted zma mir | GGGCATCTTCTGGCAG | 2780 | Down | 1.64 | |
| 49269 | GAGGACA/101 | | | | |
| Predicted zma mir | TACGGAAGAAGAGCAA | 2781 | Down | 1.64 | |
| 49435 | GTTTT/102 | | | | |
| Predicted zma mir | TAGAAAGAGCGAGAGA | 2782 | Down | | 1.55 |
| 49445 | ACAAAG/103 | | | | |
| Predicted zma mir | TGATATTATGGACGAC | 2783 | Down | 1.54 | 1.57 |
| 49762 | TGGTT/104 | | | | |
| Predicted zma mir | TGGAAGGGCCATGCCG | 2784 | Down | | 2.45 |
| 49816 | AGGAG/105 | | | | |
| Predicted zma mir | TTGAGCGCAGCGTTGA | 2785 | Down | | 2.93 |
| 49985 | TGAGC/106 | | | | |
| Predicted zma mir | TTGGATAACGGGTAGT | 2786 | Down | | 1.79 |
| 50021 | TTGGAGT/107 | | | | |
| Predicted zma mir | AGCTGCCGACTCATTC | 2787 | Down | | 1.54 |
| 50144 | ACCCA/108 | | | | |
| Predicted zma mir | TGTACGATGATCAGGA | 2788 | Down | 1.53 | |
| 50263 | GGAGGT/109 | | | | |
| Predicted zma mir | TGTGTTCTCAGGTCGCC | 2789 | Down | | 2.51 |
| 50266 | CCCG/110 | | | | |
| Predicted zma mir | ACTAAAAAGAAACAGA | 2790 | Down | 1.5 | |
| 50318 | GGGAG/111 | | | | |
| Predicted zma mir | GACCGGCTCGACCCTT | 2791 | Down | 1.55 | |
| 50517 | CTGC/112 | | | | |
| Predicted zma mir | TGGTAGGATGGATGGA | 2792 | Down | 1.55 | |
| 50670 | GAGGGT/113 | | | | |
| zma-miR166d* | GGAATGTTGTCTGGTTC | 266 | Down | 1.73 | |
| | AAGG/114 | | | | |
| zma-miR169c* | GGCAAGTCTGTCCTTG | 267 | Down | 2.41 | |
| | GCTACA/115 | | | | |
| zma-miR399g | TGCCAAAGGGGATTTG | 271 | Down | | 1.55 |
| | CCCGG/118 | | | | |

Table 2. Provided are the sequence information and annotation of the miRNAs which are downregulated in plants grown under Nitrogen-deficient conditions versus optimal Nitrogen conditions.

TABLE 3
siRNAs Found to be Upregulated in Plants Growing under Nitrogen
Deficient versus Optimal Conditions

| | | | Fold | |
|---|---|---|---|---|
| | | | Change | Fold Change |
| Mir Name | Mature Sequence/SEQ ID NO: | Direction | Leaf | Root |
| Predicted | AAGAAACGGGGCAGTGAGA | Up | | 1.51 |
| siRNA 54339 | TGGAC/119 | | | |
| Predicted | AGAAAAGATTGAGCCGAAT | Up | 2.02 | |
| siRNA 54631 | TGAATT/120 | | | |
| Predicted | AGAGCCTGTAGCTAATGGT | Up | 1.95 | |
| siRNA 54991 | GGG/121 | | | |
| Predicted | AGGTAGCGGCCTAAGAACG | Up | 2.36 | 1.67 |
| siRNA 55111 | ACACA/122 | | | |
| Predicted | CCTATATACTGGAACGGAA | Up | | 1.57 |
| siRNA 55423 | CGGCT/123 | | | |
| Predicted | CTATATACTGGAACGGAAC | Up | | 2.23 |
| siRNA 55806 | GGCTT/124 | | | |
| Predicted | GACGAGATCGAGTCTGGAG | Up | 1.86 | |
| siRNA 56052 | CGAGC/125 | | | |
| Predicted | GAGTATGGGGAGGGACTAG | Up | | 2.3 |
| siRNA 56106 | GGA/126 | | | |
| Predicted | GACGAAATAGAGGCTCAGG | Up | 2.08 | |
| siRNA 56353 | AGAGG/127 | | | |
| Predicted | GGATTCGTGATTGGCGATG | Up | | 1.51 |
| siRNA 56388 | GGG/128 | | | |
| Predicted | GGTGAGAAACGGAAAGGCA | Up | 4.04 | |
| siRNA 56406 | GGACA/129 | | | |
| Predicted | GTGTCTGAGCAGGGTGAGA | Up | 1.53 | 1.58 |
| siRNA 56443 | AGGCT/130 | | | |
| Predicted | GTTTTGGAGGCGTAGGCGA | Up | 3.04 | |
| siRNA 56450 | GGGAT/131 | | | |
| Predicted | TGGGACGCTGCATCTGTTGA | Up | 2.96 | |
| siRNA 56542 | T/132 | | | |
| Predicted | TCTATATACTGGAACGGAA | Up | | 1.76 |
| siRNA 56706 | CGGCT/133 | | | |
| Predicted | GTTGTTGGAGGGGTAGAGG | Up | 1.55 | |
| siRNA 56856 | ACGTC/134 | | | |
| Predicted | AATGACAGGACGGGATGGG | Up | | 2.87 |
| siRNA 57034 | ACGGG/135 | | | |
| Predicted | ACGGAACGGCTTCATACCA | Up | | 2.43 |
| siRNA 57054 | CAATA/136 | | | |
| Predicted | GACGGGCCGACATTTAGAG | Up | | 1.69 |
| siRNA 57193 | CACGG/137 | | | |
| Predicted | ACGGATAAAAGGTACTCT/ | Up | | 2.82 |
| siRNA 57884 | 138 | | | |
| Predicted | AGTATGTCGAAAACTGGAG | Up | 4.54 | |
| siRNA 58292 | GGC/139 | | | |
| Predicted | ATAAGCACCGGCTAACTCT/ | Up | | 2.87 |
| siRNA 58362 | 140 | | | |
| Predicted | ATTCAGCGGGCGTGGTTATT | Up | | 1.55 |
| siRNA 58665 | GGCA/141 | | | |
| Predicted | CAGCGGGTGCCATAGTCGA | Up | | 1.92 |
| siRNA 58872 | T/142 | | | |
| Predicted | CATTGCGACGGTCCTCAA/ | Up | | 1.57 |
| siRNA 58940 | 143 | | | |
| Predicted | CTCAACGGATAAAAGGTAC/ | Up | | 2.21 |
| siRNA 59380 | 144 | | | |
| Predicted | GACAGTCAGGATGTTGGCT/ | Up | 2.68 | 2.12 |
| siRNA 59626 | 145 | | | |
| Predicted | GACTGATCCTTCGGTGTCGG | Up | | 1.67 |
| siRNA 59659 | CG/146 | | | |
| Predicted | GCCGAAGATTAAAAGACGA | Up | 1.64 | |
| siRNA 59846 | GACGA/147 | | | |
| Predicted | GCCTTTGCCGACCATCCTGA | Up | | 1.6 |
| siRNA 59867 | /148 | | | |
| Predicted | GGAATCGCTAGTAATCGTG | Up | 1.87 | 1.76 |
| siRNA 59952 | GAT/149 | | | |
| Predicted | GGAGCAGCTCTGGTCGTGG | Up | | 1.85 ± 0.007 |
| siRNA 59961 | G/150 | | | |
| Predicted | GGAGGCTCGACTATGTTCA | Up | | 2.97 |
| siRNA 59965 | AA/151 | | | |
| Predicted | GGAGGGATGTGAGAACATG | Up | | 1.62 |
| siRNA 59966 | GGC/152 | | | |
| Predicted | GTCCCCTTCGTCTAGAGGC/ | Up | | 2.82 |
| siRNA 60081 | 153 | | | |
| Predicted | GTCTGAGTGGTGTAGTTGGT/ | Up | 2.12 | |
| siRNA 60095 | 154 | | | |
| Predicted | GTTGGTAGAGCAGTTGGC/ | Up | | 4.11 |
| siRNA 60188 | 155 | | | |
| Predicted | TACGTTCCCGGGTCTTGTAC | Up | | 1.95 |
| siRNA 60285 | A/156 | | | |
| Predicted | TATGGATGAAGATGGGGGT | Up | 3.68 | |
| siRNA 60387 | G/157 | | | |
| Predicted | TCAACGGATAAAAGGTACT | Up | | 2.23 |
| siRNA 60434 | CCG/158 | | | |
| Predicted | TGCCCAGTGCTTTGAATG/ | Up | | 3.37 |
| siRNA 60837 | 159 | | | |
| Predicted | TGCGAGACCGACAAGTCGA | Up | 1.64 | 1.86 |
| siRNA 60850 | GC/160 | | | |
| Predicted | TTTGCGACACGGGCTGCTCT/ | Up | | 1.52 |
| siRNA 61382 | 161 | | | |

Table 3. Provided are the sequence information and annotation of the siRNAs which are upregulated in plants grown under Nitrogen-deficient conditions versus optimal Nitrogen conditions.

TABLE 4
siRNAs Found to be Downregulated in Plants Growing
under Nitrogen Deficient versus Optimal Conditions

| | Mature | | Fold | Fold |
|---|---|---|---|---|
| Mir | Sequence/SEQ ID | Direc- | Change | Change |
| Name | NO: | tion | Leaf | Root |
| Predicted | CATCGCTCAACG | down | | 1.55 |
| siRNA | GACAAAAGGT/ | | | |
| 58924 | 162 | | | |
| Predicted | AAGACGAAGGTA | Down | 2.79 | |
| siRNA | GCAGCGCGATAT/ | | | |
| 54240 | 163 | | | |
| Predicted | AGCCAGACTGAT | Down | 1.51 | |
| siRNA | GAGAGAAGGAGG/ | | | |
| 54957 | 164 | | | |
| Predicted | ACGTTGTTGGAA | Down | 1.56 | |
| siRNA | GGGTAGAGGACG/ | | | |
| 55081 | 165 | | | |
| Predicted | CAAGTTATGCAG | Down | | 5.98 |
| siRNA | TTGCTGCCT/166 | | | |
| 55393 | | | | |
| Predicted | CAGAATGGAGGA | Down | 3.49 | |
| siRNA | AGAGATGGTG/167 | | | |
| 55404 | | | | |
| Predicted | ATCTGTGGAGAG | Down | 1.58 | |
| siRNA | AGAAGGTTGCCC/ | | | |
| 55472 | 168 | | | |
| Predicted | ATGTCAGGGGGC | Down | 2.41 | |
| siRNA | CATGCAGTAT/169 | | | |
| 55720 | | | | |
| Predicted | ATCCTGACTGTG | Down | 1.96 | |
| siRNA | CCGGGCCGGCCC/ | | | |
| 55732 | 170 | | | |
| Predicted | CGAGTTCGCCGT | Down | | 2.24 |
| siRNA | AGAGAAAGCT/171 | | | |
| 56034 | | | | |
| Predicted | GACTGATTCGGA | Down | | 3.23 |
| siRNA | CGAAGGAGGGTT/ | | | |
| 56162 | 172 | | | |
| Predicted | GTCTGAACACTA | Down | 1.87 | |
| siRNA | AACGAAGCACA/173 | | | |
| 56205 | | | | |
| Predicted | GACGTTGTTGGA | Down | 3.94 | |
| siRNA | AGGGTAGAGGAC/ | | | |
| 56277 | 174 | | | |
| Predicted | GCTACTGTAGTTC | Down | 1.71 | |
| siRNA | ACGGGCCGGCC/ | | | |
| 56307 | 175 | | | |
| Predicted | GGTATTCGTGAG | Down | 1.67 | |
| siRNA | CCTGTTTCTGGTT/ | | | |
| 56425 | 176 | | | |
| Predicted | TGGAAGGAGCAT | Down | | 2.68 |
| siRNA | GCATCTTGAG/177 | | | |
| 56837 | | | | |
| Predicted | TTCTTGACCTTGT | Down | | 3.66 |
| siRNA | AAGACCCA/178 | | | |
| 56965 | | | | |
| Predicted | AGCAGAATGGAG | Down | 1.53 | |
| siRNA | GAAGAGATGG/179 | | | |
| 57088 | | | | |
| Predicted | CTGGACACTGTT | Down | 1.58 | |
| siRNA | GCAGAAGGAGGA/ | | | |
| 57179 | 180 | | | |
| Predicted | GAAATAGGATAG | Down | 3.34 | 2.91 |
| siRNA | GAGGAGGGATGA/ | | | |
| 57181 | 181 | | | |
| Predicted | GGCACGACTAAC | Down | | 2.45 |
| siRNA | AGACTCACGGGC/ | | | |
| 57228 | 182 | | | |
| Predicted | AATCCCGGTGGA | Down | 3.6 | 2.7 |
| siRNA | ACCTCCA/183 | | | |
| 57685 | | | | |
| Predicted | ACACGACAAGAC | Down | | 1.57 |
| siRNA | GAATGAGAGAGA/ | | | |
| 57772 | 184 | | | |
| Predicted | ACGACGAGGACT | Down | 1.53 | |
| siRNA | TCGAGACG/185 | | | |
| 57863 | | | | |
| Predicted | CAAAGTGGTCGT | Down | 1.61 | |
| siRNA | GCCGGAG/186 | | | |
| 58721 | | | | |
| Predicted | CAGCTTGAGAAT | Down | 3.8 | |
| siRNA | CGGGCCGC/187 | | | |
| 58877 | | | | |
| Predicted | CCCTGTGACAAG | Down | 1.6 | |
| siRNA | AGGAGGA/188 | | | |
| 59032 | | | | |
| Predicted | CCTGCTAACTAG | Down | 1.74 | |
| siRNA | TTATGCGGAGC/189 | | | |
| 59102 | | | | |
| Predicted | CGAACTCAGAAG | Down | 2.11 | 2.62 |
| siRNA | TGAAACC/190 | | | |
| 59123 | | | | |
| Predicted | CGCTTCGTCAAG | Down | 1.59 | |
| siRNA | GAGAAGGGC/191 | | | |
| 59235 | | | | |
| Predicted | CTTAACTGGGCG | Down | | 2.17 |
| siRNA | TTAAGTTGCAGG | | | |
| 59485 | GT/192 | | | |
| Predicted | GGACGAACCTCT | Down | | 1.76 |
| siRNA | GGTGTACC/193 | | | |
| 59954 | | | | |
| Predicted | GGCGCTGGAGAA | Down | | 2.58 |
| siRNA | CTGAGGG/194 | | | |
| 59993 | | | | |
| Predicted | GGGGGCCTAAAT | Down | 2.48 | |
| siRNA | AAAGACT/195 | | | |
| 60012 | | | | |
| Predicted | GTGCTAACGTCC | Down | | 3.15 |
| siRNA | GTCGTGAA/196 | | | |
| 60123 | | | | |
| Predicted | TAGCTTAACCTTC | Down | | 1.9 |
| siRNA | GGGAGGG/197 | | | |
| 60334 | | | | |
| Predicted | TGAGAAAGAAAG | Down | 1.64 | |
| siRNA | AGAAGGCTCA/ | | | |
| 60750 | 198 | | | |
| Predicted | TGATGTCCTTAG | Down | | 1.99 |
| siRNA | ATGTTCTGGGC/199 | | | |
| 60803 | | | | |
| Predicted | CATGTGTTCTCAG | Down | | 2.55 |
| siRNA | GTCGCCCC/200 | | | |
| 55413 | | | | |

Table 4. Provided are the sequence information and annotation of the siRNAs which are downregulated in plants grown under Nitrogen-deficient versus optimal Nitrogen conditions.

### Example 2

### Identification of Homologous and Orthologous Sequences for the Differential miRNAs and siRNAs Listed in Tables 1-4 Above

[0224] The miRNA sequences of some embodiments of the invention that were upregulated under nitrogen limiting conditions were examined for homologous and orthologous sequences using the miRBase database (www.mirbase.org/) and the Plant MicroRNA Database (PMRD, www.bioinformatics.cau.edu.cn/PMRD). The mature miRNA sequences that are homologous or orthologous to the miRNAs of the invention (listed in Tables 1-2 above) are found using miRNA public databases, having at least 60% identity to the Maize mature sequence and are summarized in Tables 5-7 below [as determined by Blast analysis (Version 2.2.25+), Released March 2011] using the following parameters as defined in MirBase: Search algorithm: BLASTN; Sequence database: mature; Evalue cutoff: 10; Max alignments: 100; Word size: 4; Match score: +5; Mismatch penalty: −4;

TABLE 5
Summary of Homologs/Orthologs of miRNAs of Table 1

| | | | | | | | | Hom. |
|---|---|---|---|---|---|---|---|---|
| | | | Stem- | | | | | Stem- |
| | Mature | | loop | | | | | loop |
| Small | sequence/ | | SEQ | | | | | SEQ |
| RNA | SEQ ID | Mir | ID | Hom. | Hom. SEQ | Hom. | % | ID |
| Name | NO: | length | NO: | Name | ID NO: | length | Identity | NO: |
| zma- | GGGCAA | 22 | 260 | aly- | GGGCAAA | 22 | 0.86 | 272 |
| miR399f* | CTTCTCC | | | miR399g* | TACTCCAT | | | |
| | TTTGGCA | | | | TGGCAGA/ | | | |
| | GA/7 | | | | 201 | | | |
| | | | | aly- | GGGCAAA | 22 | 0.86 | 273 |
| | | | | miR399i* | TACTCCAT | | | |
| | | | | | TGGCAGA/ | | | |
| | | | | | 202 | | | |
| | | | | aly- | GGGCGAA | 22 | 0.82 | 274 |
| | | | | miR399d* | TACTCCTA | | | |
| | | | | | TGGCAGA/ | | | |
| | | | | | 203 | | | |
| | | | | aly- | GGGCAAG | 22 | 0.82 | 275 |
| | | | | miR399f* | ATCACCAT | | | |
| | | | | | TGGCAGA/ | | | |
| | | | | | 204 | | | |
| | | | | aly- | GGGCGCC | 21 | 0.77 | 276 |
| | | | | miR399b* | TCTCCATT | | | |
| | | | | | GGCAGG/ | | | |
| | | | | | 205 | | | |
| | | | | aly- | GGGCATCT | 21 | 0.77 | 277 |
| | | | | miR399c* | TTCTATTG | | | |
| | | | | | GCAGG/206 | | | |
| | | | | aly- | GGGCAAG | 22 | 0.77 | 278 |
| | | | | miR399h* | ATCTCTAT | | | |
| | | | | | TGGCAGG/ | | | |
| | | | | | 207 | | | |
| | | | | zma- | GGGTACG | 21 | 0.77 | 279 |
| | | | | miR399c* | TCTCCTTT | | | |
| | | | | | GGCACA/ | | | |
| | | | | | 208 | | | |
| | | | | zma- | GGGCAAC | 21 | 0.77 | 280 |
| | | | | miR399g* | CCCCCGTT | | | |
| | | | | | GGCAGG/ | | | |
| | | | | | 209 | | | |
| | | | | zma- | AGGCAGC | 21 | 0.77 | 281 |
| | | | | miR399j* | TCTCCTCT | | | |
| | | | | | GGCAGG/ | | | |
| | | | | | 210 | | | |
| | | | | aly- | GGGTAAG | 22 | 0.73 | 282 |
| | | | | miR399a* | ATCTCTAT | | | |
| | | | | | TGGCAGG/ | | | |
| | | | | | 211 | | | |
| | | | | aly- | GGGCGAA | 22 | 0.73 | 283 |
| | | | | miR399e* | TCCTCTAT | | | |
| | | | | | TGGCAGG/ | | | |
| | | | | | 212 | | | |
| | | | | zma- | GTGCAGCT | 21 | 0.73 | 284 |
| | | | | miR399b* | CTCCTCTG | | | |
| | | | | | GCATG/213 | | | |
| | | | | zma- | GTGCAGTT | 21 | 0.73 | 285 |
| | | | | miR399h* | CTCCTCTG | | | |
| | | | | | GCACG/214 | | | |
| | | | | zma- | GTGCGGTT | 21 | 0.68 | 286 |
| | | | | miR399a* | CTCCTCTG | | | |
| | | | | | GCACG/215 | | | |
| | | | | zma- | GGGCTTCT | 21 | 0.68 | 287 |
| | | | | miR399e* | CTTTCTTG | | | |
| | | | | | GCAGG/216 | | | |
| | | | | zma- | GTGCGGCT | 21 | 0.68 | 288 |
| | | | | miR399i* | CTCCTCTG | | | |
| | | | | | GCATG/217 | | | |
| | | | | zma- | GTGTGGCT | 21 | 0.64 | 289 |
| | | | | miR399d* | CTCCTCTG | | | |
| | | | | | GCATG/218 | | | |
| Predicted | GGAATG | 21 | | zma- | GGAATGTT | 21 | 1 | 290 |
| zma | TTGTCTG | | | miR166b* | GTCTGGTT | | | |
| mir | GTTCAA | | | | CAAGG/219 | | | |
| 50204 | GG/50 | | | zma- | GGAATGTT | 21 | 1 | 291 |
| | | | | miR166d* | GTCTGGTT | | | |
| | | | | | CAAGG/220 | | | |
| | | | | aly- | GGAATGTT | 21 | 0.9 | 292 |
| | | | | miR166a* | GTCTGGCT | | | |
| | | | | | CGAGG/221 | | | |
| | | | | aly- | GGAATGTT | 21 | 0.9 | 293 |
| | | | | miR166c* | GTCTGGCT | | | |
| | | | | | CGAGG/222 | | | |
| | | | | aly- | GGAATGTT | 21 | 0.9 | 294 |
| | | | | miR166d* | GTCTGGCT | | | |
| | | | | | CGAGG/223 | | | |
| | | | | csi- | GGAATGTT | 21 | 0.9 | 295 |
| | | | | miR166e* | GTCTGGCT | | | |
| | | | | | CGAGG/224 | | | |
| | | | | zma- | GGAATGTT | 21 | 0.9 | 296 |
| | | | | miR166c* | GTCTGGCT | | | |
| | | | | | CGAGG/225 | | | |
| | | | | zma- | GGTTTGTT | 22 | 0.9 | 297 |
| | | | | miR166j* | TGTCTGGT | | | |
| | | | | | TCAAGG/ | | | |
| | | | | | 226 | | | |
| | | | | aly- | GGACTGTT | 21 | 0.86 | 298 |
| | | | | miR166b* | GTCTGGCT | | | |
| | | | | | CGAGG/227 | | | |
| | | | | aly- | GGAATGTT | 21 | 0.86 | 299 |
| | | | | miR166e* | GTCTGGCA | | | |
| | | | | | CGAGG/228 | | | |
| | | | | aly- | GGAATGTT | 21 | 0.86 | 300 |
| | | | | miR166g* | GTTTGGCT | | | |
| | | | | | CGAGG/229 | | | |
| | | | | zma- | GGAATGTT | 21 | 0.86 | 301 |
| | | | | miR166a* | GTCTGGCT | | | |
| | | | | | CGGGG/230 | | | |
| | | | | zma- | GGAATGTT | 21 | 0.86 | 302 |
| | | | | miR166g* | GTCTGGTT | | | |
| | | | | | GGAGA/231 | | | |
| | | | | zma- | GGAATGTT | 21 | 0.86 | 303 |
| | | | | miR166m* | GGCTGGCT | | | |
| | | | | | CGAGG/232 | | | |
| | | | | zma- | GGATTGTT | 21 | 0.81 | 304 |
| | | | | miR166k* | GTCTGGCT | | | |
| | | | | | CGGGG/233 | | | |
| | | | | zma- | GGAATGT | 21 | 0.76 | 305 |
| | | | | miR166i* | CGTCTGGC | | | |
| | | | | | GCGAGA/ | | | |
| | | | | | 234 | | | |
| | | | | zma- | GGATTGTT | 21 | 0.76 | 306 |
| | | | | miR166n* | GTCTGGCT | | | |
| | | | | | CGGTG/235 | | | |
| | | | | aly- | TGAATGAT | 21 | 0.71 | 307 |
| | | | | miR166f* | GCCTGGCT | | | |
| | | | | | CGAGA/236 | | | |
| | | | | zma- | GAATGGA | 20 | 0.71 | 308 |
| | | | | miR166l* | GGCTGGTC | | | |
| | | | | | CAAGA/237 | | | |
| | | | | zma- | GGAATGA | 21 | 0.67 | 309 |
| | | | | miR166h* | CGTCCGGT | | | |
| | | | | | CCGAAC/ | | | |
| | | | | | 238 | | | |

Table 5: Provided are homologues/orthologs of the miRNAs described in Table 1 above, along with the sequence identifiers and the degree of sequence identity.

TABLE 6
Summary of Homologs/Orthologs of miRNAs of Table 2

| | | | Stem- | | | | | Hom. |
|---|---|---|---|---|---|---|---|---|
| | | | loop | | | | | Stem- |
| | | | sequence/ | | | | | loop |
| Small | Mature | | SEQ | | | | | SEQ |
| RNA | SEQ ID | Mir | ID | | Hom. SEQ ID | Homo. | | ID |
| Name | NO: | length | NO: | Hom. Name | NO: | length | Identity | NO: |
| zma- | GGCAA | 22 | 267 | aly-miR169a* | GGCAAGTTGT | 21 | 0.95 | 1842 |
| miR169c* | GTCTGT | | | | CCTTGGCTAC | | | |
| | CCTTG | | | | A/1032 | | | |
| | GCTAC | | | zma | GGCAAGTTGT | 21 | 0.95 | 1843 |
| | A/115 | | | miR169r* | CCTTGGCTAC | | | |
| | | | | | A/1033 | | | |
| | | | | zma- | GGCAAGTTGT | 21 | 0.91 | 1844 |
| | | | | miR169a* | TCTTGGCTAC | | | |
| | | | | | A/1034 | | | |
| | | | | zma- | GGCAAGTTGT | 21 | 0.91 | 1845 |
| | | | | miR169b* | TCTTGGCTAC | | | |
| | | | | | A/1035 | | | |
| | | | | zma- | GGCATGTCTT | 21 | 0.86 | 1846 |
| | | | | miR169f* | CCTTGGCTAC | | | |
| | | | | | T/1036 | | | |
| | | | | ath-miR169g* | TCCGGCAAGT | 21 | 0.77 | 1847 |
| | | | | | TGACCTTGGC | | | |
| | | | | | T/1037 | | | |
| | | | | aly-miR169b* | GGCAAGTTGT | 22 | 0.73 | 1848 |
| | | | | | CCTTCGGCTA | | | |
| | | | | | CA/1038 | | | |
| | | | | aly-miR169c* | GGCAAGTCAT | 21 | 0.73 | 1849 |
| | | | | | CTCTGGCTAT | | | |
| | | | | | G/1039 | | | |
| | | | | aly-miR169d* | GCAAGTTGAC | 21 | 0.73 | 1850 |
| | | | | | CTTGGCTCTG | | | |
| | | | | | T/1040 | | | |
| | | | | aly-miR169e* | GCAAGTTGAC | 21 | 0.73 | 1851 |
| | | | | | CTTGGCTCTG | | | |
| | | | | | T/1041 | | | |
| | | | | aly-miR169f* | GCAAGTTGAC | 21 | 0.73 | 1852 |
| | | | | | CTTGGCTCTG | | | |
| | | | | | C/1042 | | | |
| | | | | aly-miR169g* | GCAAGTTGAC | 21 | 0.73 | 1853 |
| | | | | | CTTGGCTCTG | | | |
| | | | | | T/1043 | | | |
| | | | | zma- | GGCAGGTCTT | 20 | 0.73 | 1854 |
| | | | | miR169o* | CTTGGCTAGC/ | | | |
| | | | | | 1044 | | | |
| | | | | zma- | GGCAAGTCAT | 21 | 0.73 | 1855 |
| | | | | miR169p* | CTGGGGCTAC | | | |
| | | | | | G/1045 | | | |
| | | | | aly-miR169h* | GGCAGTCTCC | 19 | 0.68 | 1856 |
| | | | | | TTGGCTATT/ | | | |
| | | | | | 1046 | | | |
| | | | | aly-miR169j* | GGCAGTCTCC | 19 | 0.68 | 1857 |
| | | | | | TTGGCTATC/ | | | |
| | | | | | 1047 | | | |
| | | | | aly-miR169k* | GGCAGTCTCC | 19 | 0.68 | 1858 |
| | | | | | TTGGCTATC/ | | | |
| | | | | | 1048 | | | |
| | | | | aly-miR169l* | GGCAGTCTCC | 19 | 0.68 | 1859 |
| | | | | | TTGGCTATC/ | | | |
| | | | | | 1049 | | | |
| | | | | zma- | GGCAGTCTCC | 18 | 0.68 | 1860 |
| | | | | miR169i* | TTGGCTAG/ | | | |
| | | | | | 1050 | | | |
| | | | | zma- | GGCAGTCTCC | 18 | 0.68 | 1861 |
| | | | | miR169j* | TTGGCTAG/ | | | |
| | | | | | 1051 | | | |
| | | | | zma- | GGCAGTCTCC | 18 | 0.68 | 1862 |
| | | | | miR169k* | TTGGCTAG/ | | | |
| | | | | | 1052 | | | |
| | | | | zma- | GGCAAATCAT | 20 | 0.68 | 1863 |
| | | | | miR169l* | CCCTGCTACC/ | | | |
| | | | | | 1053 | | | |
| | | | | zma- | GGCATCCATT | 20 | 0.68 | 1864 |
| | | | | miR169m* | CTTGGCTAAG/ | | | |
| | | | | | 1054 | | | |
| | | | | zma- | GGCAGGCCTT | 20 | 0.68 | 1865 |
| | | | | miR169n* | CTTGGCTAAG/ | | | |
| | | | | | 1055 | | | |
| | | | | aly-miR169i* | GGCAGTCTCC | 19 | 0.64 | 1866 |
| | | | | | TTGGATATC/ | | | |
| | | | | | 1056 | | | |
| | | | | aly- | GGCAGTCTTC | 19 | 0.64 | 1867 |
| | | | | miR169m* | TTGGCTATC/ | | | |
| | | | | | 1057 | | | |
| | | | | aly-miR169n* | GGCAGTCTCT | 19 | 0.64 | 1868 |
| | | | | | TTGGCTATC/ | | | |
| | | | | | 1058 | | | |
| | | | | aqc-miR169a | TAGCCAAGGA | 21 | 0.64 | 1869 |
| | | | | | TGACTTGCCT | | | |
| | | | | | A/1059 | | | |
| | | | | bdi-miR169d | TAGCCAAGAA | 21 | 0.64 | 1870 |
| | | | | | TGACTTGCCT | | | |
| | | | | | A/1060 | | | |
| | | | | bdi-miR169h | TAGCCAAGGA | 21 | 0.64 | 1871 |
| | | | | | TGACTTGCCT | | | |
| | | | | | A/1061 | | | |
| | | | | bdi-miR169i | CCAGCCAAGA | 22 | 0.64 | 1872 |
| | | | | | ATGGCTTGCC | | | |
| | | | | | TA/1062 | | | |
| | | | | bna-miR169c | TAGCCAAGGA | 21 | 0.64 | 1873 |
| | | | | | TGACTTGCCT | | | |
| | | | | | A/1063 | | | |
| | | | | bna-miR169d | TAGCCAAGGA | 21 | 0.64 | 1874 |
| | | | | | TGACTTGCCT | | | |
| | | | | | A/1064 | | | |
| | | | | bna-miR169e | TAGCCAAGGA | 21 | 0.64 | 2620 |
| | | | | | TGACTTGCCT | | | |
| | | | | | A/1065 | | | |
| | | | | bna-miR169f | TAGCCAAGGA | 21 | 0.64 | 1876 |
| | | | | | TGACTTGCCT | | | |
| | | | | | A/1066 | | | |
| | | | | bna-miR169g | TAGCCAAGGA | 22 | 0.64 | 1877 |
| | | | | | TGACTTGCCT | | | |
| | | | | | GC/1067 | | | |
| | | | | bna-miR169h | TAGCCAAGGA | 22 | 0.64 | 1878 |
| | | | | | TGACTTGCCT | | | |
| | | | | | GC/1068 | | | |
| | | | | bna-miR169i | TAGCCAAGGA | 22 | 0.64 | 1879 |
| | | | | | TGACTTGCCT | | | |
| | | | | | GC/1069 | | | |
| | | | | bna-miR169j | TAGCCAAGGA | 22 | 0.64 | 1880 |
| | | | | | TGACTTGCCT | | | |
| | | | | | GC/1070 | | | |
| | | | | bna-miR169k | TAGCCAAGGA | 22 | 0.64 | 1881 |
| | | | | | TGACTTGCCT | | | |
| | | | | | GC/1071 | | | |
| | | | | bna-miR169l | TAGCCAAGGA | 22 | 0.64 | 1882 |
| | | | | | TGACTTGCCT | | | |
| | | | | | GC/1072 | | | |
| | | | | far-miR169 | TAGCCAAGGA | 21 | 0.64 | 1883 |
| | | | | | TGACTTGCCT | | | |
| | | | | | A/1073 | | | |
| | | | | mtr-miR169f | AAGCCAAGGA | 21 | 0.64 | 1884 |
| | | | | | TGACTTGCCT | | | |
| | | | | | A/1074 | | | |
| | | | | osa-miR169f | TAGCCAAGGA | 21 | 0.64 | 1885 |
| | | | | | TGACTTGCCT | | | |
| | | | | | A/1075 | | | |
| | | | | osa-miR169g | TAGCCAAGGA | 21 | 0.64 | 1886 |
| | | | | | TGACTTGCCT | | | |
| | | | | | A/1076 | | | |
| | | | | osa-miR169n | TAGCCAAGAA | 21 | 0.64 | 1887 |
| | | | | | TGACTTGCCT | | | |
| | | | | | A/1077 | | | |
| | | | | osa-miR169o | TAGCCAAGAA | 21 | 0.64 | 1888 |
| | | | | | TGACTTGCCT | | | |
| | | | | | A/1078 | | | |
| | | | | ptc-miR169r | TAGCCAAGGA | 21 | 0.64 | 1889 |
| | | | | | TGACTTGCCT | | | |
| | | | | | A/1079 | | | |
| | | | | sbi-miR169c | TAGCCAAGGA | 21 | 0.64 | 1890 |
| | | | | | TGACTTGCCT | | | |
| | | | | | A/1080 | | | |
| | | | | sbi-miR169d | TAGCCAAGGA | 21 | 0.64 | 2621 |
| | | | | | TGACTTGCCT | | | |
| | | | | | A/1081 | | | |
| | | | | sbi-miR169i | TAGCCAAGAA | 21 | 0.64 | 1892 |
| | | | | | TGACTTGCCT | | | |
| | | | | | A/1082 | | | |
| | | | | sbi-miR169m | TAGCCAAGGA | 21 | 0.64 | 1893 |
| | | | | | TGACTTGCCT | | | |
| | | | | | A/1083 | | | |
| | | | | sbi-miR169n | TAGCCAAGGA | 21 | 0.64 | 1894 |
| | | | | | TGACTTGCCT | | | |
| | | | | | A/1084 | | | |
| | | | | sbi-miR169p | TAGCCAAGAA | 21 | 0.64 | 1895 |
| | | | | | TGGCTTGCCT | | | |
| | | | | | A/1085 | | | |
| | | | | sbi-miR169q | TAGCCAAGAA | 21 | 0.64 | 1896 |
| | | | | | TGGCTTGCCT | | | |
| | | | | | A/1086 | | | |
| | | | | sly-miR169d | TAGCCAAGGA | 21 | 0.64 | 1897 |
| | | | | | TGACTTGCCT | | | |
| | | | | | A/1087 | | | |
| | | | | tcc-miR169d | TAGCCAAGGA | 21 | 0.64 | 1898 |
| | | | | | TGACTTGCCT | | | |
| | | | | | A/1088 | | | |
| | | | | vvi-miR169x | TAGCCAAGGA | 21 | 0.64 | 1899 |
| | | | | | TGACTTGCCT | | | |
| | | | | | A/1089 | | | |
| | | | | zma-miR169f | TAGCCAAGGA | 21 | 0.64 | 1900 |
| | | | | | TGACTTGCCT | | | |
| | | | | | A/1090 | | | |
| | | | | zma-miR169g | TAGCCAAGGA | 21 | 0.64 | 1901 |
| | | | | | TGACTTGCCT | | | |
| | | | | | A/1091 | | | |
| | | | | zma-miR169h | TAGCCAAGGA | 21 | 0.64 | 1902 |
| | | | | | TGACTTGCCT | | | |
| | | | | | A/1092 | | | |
| | | | | zma- | TAGCCAAGAA | 21 | 0.64 | 2622; |
| | | | | miR169m | TGGCTTGCCT | | | 1903 |
| | | | | | A/ 1093; | | | |
| | | | | | TAGCCAAGGA | | | |
| | | | | | TGACTTGCCT | | | |
| | | | | | A/ 1810 | | | |
| | | | | sbi-miR169h | TAGCCAAGGA | 21 | 0.64/ | 2623; |
| | | | | | TGACTTGCCT | | 0.59 | 1904 |
| | | | | | A/ 1094; | | | |
| | | | | | TAGCCAAGGA | | | |
| | | | | | TGACTTGCCT | | | |
| | | | | | G/ 1811 | | | |
| | | | | vvi-miR169e | TAGCCAAGGA | 22/21 | 0.64/ | 1905 |
| | | | | | TGACTTGCCT | | 0.59 | |
| | | | | | GC/ 1095; | | | |
| | | | | | TAGCCAAGGA | | | |
| | | | | | TGACTTGCCT | | | |
| | | | | | G/ 1812 | | | |
| | | | | zma-miR169n | TAGCCAAGAA | 21 | 0.64/ | 2624; |
| | | | | | TGGCTTGCCT | | 0.55 | 1906 |
| | | | | | A/ 1096; | | | |
| | | | | | TAGCCAAGGA | | | |
| | | | | | TGACTTGCCG | | | |
| | | | | | G/ 1813 | | | |
| | | | | zma-miR169o | TAGCCAAGAA | 21 | 0.64/ | 2625; |
| | | | | | TGACTTGCCT | | 0.55 | 1907 |
| | | | | | A/ 1097; | | | |
| | | | | | TAGCCAAGGA | | | |
| | | | | | TGACTTGCCG | | | |
| | | | | | G/ 1814 | | | |
| | | | | zma-miR169q | TAGCCAAGAA | 21 | 0.64/ | 2626; |
| | | | | | TGGCTTGCCT | | 0.55 | 1908 |
| | | | | | A/ 1098; | | | |
| | | | | | TAGCCAAGGA | | | |
| | | | | | TGACTTGCCG | | | |
| | | | | | G/ 1815 | | | |
| | | | | zma-miR169l | TAGCCAGGGA | 21 | 0.50/ | 2627; |
| | | | | | TGATTTGCCT | | 0.64 | 1909 |
| | | | | | G/ 1099; | | | |
| | | | | | TAGCCAAGGA | | | |
| | | | | | TGACTTGCCT | | | |
| | | | | | A/ 1816 | | | |
| mtr- | TGAGC | 21 | 262 | gma-miR169d | TGAGCCAAGG | 23 | 1 | 1910 |
| miR169q | CAGGA | | | | ATGACTTGCC | | | |
| | TGACTT | | | | GGT/1100 | | | |
| | GCCGG/ | | | aly-miR169f | TGAGCCAAGG | 21 | 0.95 | 1911 |
| | 61 | | | | ATGACTTGCC | | | |
| | | | | | G/ 1101 | | | |
| | | | | ath-miR169g | TGAGCCAAGG | 21 | 0.95 | 1912 |
| | | | | | ATGACTTGCC | | | |
| | | | | | G/ 1102 | | | |
| | | | | ath-miR169e | TGAGCCAAGG | 21 | 0.95 | 1913 |
| | | | | | ATGACTTGCC | | | |
| | | | | | G/ 1103 | | | |
| | | | | vvi-miR169n | GAGCCAAGGA | 21 | 0.95 | 1914 |
| | | | | | TGACTTGCCG | | | |
| | | | | | G/ 1104 | | | |
| | | | | aly-miR169e | TGAGCCAAGG | 21 | 0.95 | 1915 |
| | | | | | ATGACTTGCC | | | |
| | | | | | G/ 1105 | | | |
| | | | | aly-miR169d | TGAGCCAAGG | 21 | 0.95 | 1916 |
| | | | | | ATGACTTGCC | | | |
| | | | | | G/ 1106 | | | |
| | | | | ath-miR169d | TGAGCCAAGG | 21 | 0.95 | 1917 |
| | | | | | ATGACTTGCC | | | |
| | | | | | G/ 1107 | | | |
| | | | | ath-miR169f | TGAGCCAAGG | 21 | 0.95 | 1918 |
| | | | | | ATGACTTGCC | | | |
| | | | | | G/ 1108 | | | |
| | | | | rco-miR169c | TGAGCCAAGG | 21 | 0.95 | 1919 |
| | | | | | ATGACTTGCC | | | |
| | | | | | G/ 1109 | | | |
| | | | | mtr-miR169p | TGAGCCAGGA | 21 | 0.95 | 1920 |
| | | | | | TGGCTTGCCG | | | |
| | | | | | G/ 1110 | | | |
| | | | | aly-miR169g | TGAGCCAAGG | 21 | 0.95 | 1921 |
| | | | | | ATGACTTGCC | | | |
| | | | | | G/ 1111 | | | |
| | | | | vvi-miR169p | GAGCCAAGGA | 21 | 0.95 | 1922 |
| | | | | | TGACTTGCCG | | | |
| | | | | | G/ 1112 | | | |
| | | | | vvi-miR169q | GAGCCAAGGA | 21 | 0.95 | 1923 |
| | | | | | TGACTTGCCG | | | |
| | | | | | G/ 1113 | | | |
| | | | | ptc-miR169n | TGAGCCAAGG | 21 | 0.95 | 1924 |
| | | | | | ATGACTTGCC | | | |
| | | | | | G/ 1114 | | | |
| | | | | vvi-miR169m | GAGCCAAGGA | 21 | 0.95 | 1925 |
| | | | | | TGACTTGCCG | | | |
| | | | | | G/ 1115 | | | |
| | | | | tcc-miR169m | TGAGCCAAGG | 21 | 0.95 | 1926 |
| | | | | | ATGACTTGCC | | | |
| | | | | | G/ 1116 | | | |
| | | | | mtr-miR169m | GAGCCAAGGA | 21 | 0.95 | 1927 |
| | | | | | TGACTTGCCG | | | |
| | | | | | G/ 1117 | | | |
| | | | | bna-miR169m | TGAGCCAAAG | 21 | 0.9 | 1928 |
| | | | | | ATGACTTGCC | | | |
| | | | | | G/ 1118 | | | |
| | | | | gma-miR169e | AGCCAAGGAT | 20 | 0.9 | 1929 |
| | | | | | GACTTGCCGG/ | | | |
| | | | | | 1119 | | | |
| | | | | vvi-miR169b | TGAGCCAAGG | 21 | 0.9 | 1930 |
| | | | | | ATGGCTTGCC | | | |
| | | | | | G/ 1120 | | | |
| | | | | mtr-miR169h | GAGCCAAAGA | 21 | 0.9 | 1931 |
| | | | | | TGACTTGCCG | | | |
| | | | | | G/1121 | | | |
| | | | | mtr-miR169e | GGAGCCAAGG | 21 | 0.9 | 1932 |
| | | | | | ATGACTTGCC | | | |
| | | | | | G/1122 | | | |
| | | | | ptc-miR169t | GAGCCAAGAA | 21 | 0.9 | 1933 |
| | | | | | TGACTTGCCG | | | |
| | | | | | G/1123 | | | |
| | | | | vvi-miR169o | GAGCCAAGGA | 21 | 0.9 | 1934 |
| | | | | | TGACTTGCCG | | | |
| | | | | | C/1124 | | | |
| | | | | vvi-miR169u | TGAGTCAAGG | 21 | 0.9 | 1935 |
| | | | | | ATGACTTGCC | | | |
| | | | | | G/1125 | | | |
| | | | | vvi-miR169r | TGAGTCAAGG | 21 | 0.9 | 1936 |
| | | | | | ATGACTTGCC | | | |
| | | | | | G/1126 | | | |
| | | | | vvi-miR169h | TGAGCCAAGG | 21 | 0.9 | 1937 |
| | | | | | ATGGCTTGCC | | | |
| | | | | | G/1127 | | | |
| | | | | vvi-miR169l | GAGCCAAGGA | 21 | 0.9 | 1938 |
| | | | | | TGACTTGCCG | | | |
| | | | | | T/1128 | | | |
| | | | | mtr-miR169i | TGAGCCAAAG | 21 | 0.9 | 1939 |
| | | | | | ATGACTTGCC | | | |
| | | | | | G/1129 | | | |
| | | | | mtr-miR169n | TGAGCCAAAG | 21 | 0.9 | 1940 |
| | | | | | ATGACTTGCC | | | |
| | | | | | G/1130 | | | |
| | | | | mtr-miR169o | TGAGCCAAAG | 21 | 0.9 | 1941 |
| | | | | | ATGACTTGCC | | | |
| | | | | | G/1131 | | | |
| | | | | mtr-miR169l | AAGCCAAGGA | 21 | 0.9 | 1942 |
| | | | | | TGACTTGCCG | | | |
| | | | | | G/1132 | | | |
| | | | | ptc-miR169s | TCAGCCAAGG | 21 | 0.9 | 1943 |
| | | | | | ATGACTTGCC | | | |
| | | | | | G/1133 | | | |
| | | | | ptc-miR169aa | GAGCCAAGAA | 21 | 0.86 | 1944 |
| | | | | | TGACTTGTCG | | | |
| | | | | | G/1134 | | | |
| | | | | ptc-miR169o | AAGCCAAGGA | 21 | 0.86 | 1945 |
| | | | | | TGACTTGCCT | | | |
| | | | | | G/1135 | | | |
| | | | | ptc-miR169p | AAGCCAAGGA | 21 | 0.86 | 1946 |
| | | | | | TGACTTGCCT | | | |
| | | | | | G/1136 | | | |
| | | | | csi-miR169 | GAGCCAAGAA | 21 | 0.86 | 1947 |
| | | | | | TGACTTGCCG | | | |
| | | | | | A/1137 | | | |
| | | | | ama-miR169 | AGCCAAGGAT | 20 | 0.86 | 1948 |
| | | | | | GACTTGCCGA/ | | | |
| | | | | | 1138 | | | |
| | | | | vvi-miR169i | GAGCCAAGGA | 21 | 0.86 | 1949 |
| | | | | | TGACTGGCCG | | | |
| | | | | | T/1139 | | | |
| | | | | vvi-miR169t | CGAGTCAAGG | 21 | 0.86 | 1950 |
| | | | | | ATGACTTGCC | | | |
| | | | | | G/1140 | | | |
| | | | | vvi-miR169v | AAGCCAAGGA | 21 | 0.86 | 1951 |
| | | | | | TGAATTGCCG | | | |
| | | | | | G/1141 | | | |
| | | | | gma-miR169c | AAGCCAAGGA | 21 | 0.86 | 1952 |
| | | | | | TGACTTGCCG | | | |
| | | | | | A/1142 | | | |
| | | | | tcc-miR169n | TGAGTCAAGA | 21 | 0.86 | 1953 |
| | | | | | ATGACTTGCC | | | |
| | | | | | G/1143 | | | |
| | | | | mtr-miR169f | AAGCCAAGGA | 21 | 0.81 | 1954 |
| | | | | | TGACTTGCCT | | | |
| | | | | | A/1144 | | | |
| | | | | sbi-miR169j | TAGCCAAGGA | 21 | 0.81 | 1955 |
| | | | | | TGACTTGCCG | | | |
| | | | | | G/1145 | | | |
| | | | | ptc-miR169y | TAGCCATGGA | 21 | 0.81 | 1956 |
| | | | | | TGAATTGCCT | | | |
| | | | | | G/1146 | | | |
| | | | | sof-miR169 | TAGCCAAGGA | 21 | 0.81 | 1957 |
| | | | | | TGACTTGCCG | | | |
| | | | | | G/1147 | | | |
| | | | | hvu-miR169 | AAGCCAAGGA | 21 | 0.81 | 1958 |
| | | | | | TGAGTTGCCT | | | |
| | | | | | G/1148 | | | |
| | | | | ssp-miR169 | TAGCCAAGGA | 21 | 0.81 | 1959 |
| | | | | | TGACTTGCCG | | | |
| | | | | | G/1149 | | | |
| | | | | zma-miR169p | TAGCCAAGGA | 21 | 0.81 | 2628 |
| | | | | | TGACTTGCCG | | | |
| | | | | | G/1150 | | | |
| | | | | osa-miR169e | TAGCCAAGGA | 21 | 0.81 | 1961 |
| | | | | | TGACTTGCCG | | | |
| | | | | | G/1151 | | | |
| | | | | bdi-miR169b | TAGCCAAGGA | 21 | 0.81 | 1962 |
| | | | | | TGACTTGCCG | | | |
| | | | | | G/1152 | | | |
| | | | | tcc-miR169f | AAGCCAAGAA | 21 | 0.81 | 1963 |
| | | | | | TGACTTGCCT | | | |
| | | | | | G/1153 | | | |
| | | | | sly-miR169b | TAGCCAAGGA | 21 | 0.76 | 1964 |
| | | | | | TGACTTGCCT | | | |
| | | | | | G/1154 | | | |
| | | | | bdi-miR169c | CAGCCAAGGA | 21 | 0.76 | 1965 |
| | | | | | TGACTTGCCG | | | |
| | | | | | G/1155 | | | |
| | | | | ptc-miR169f | CAGCCAAGGA | 21 | 0.76 | 1966 |
| | | | | | TGACTTGCCG | | | |
| | | | | | G/1156 | | | |
| | | | | osa-miR169l | TAGCCAAGGA | 21 | 0.76 | 1967 |
| | | | | | TGACTTGCCT | | | |
| | | | | | G/1157 | | | |
| | | | | osa-miR169h | TAGCCAAGGA | 21 | 0.76 | 1968 |
| | | | | | TGACTTGCCT | | | |
| | | | | | G/1158 | | | |
| | | | | ath-miR169k | TAGCCAAGGA | 21 | 0.76 | 1969 |
| | | | | | TGACTTGCCT | | | |
| | | | | | G/1159 | | | |
| | | | | osa-miR169m | TAGCCAAGGA | 21 | 0.76 | 1970 |
| | | | | | TGACTTGCCT | | | |
| | | | | | G/1160 | | | |
| | | | | ptc-miR169k | TAGCCAAGGA | 21 | 0.76 | 1971 |
| | | | | | TGACTTGCCT | | | |
| | | | | | G/1161 | | | |
| | | | | ptc-miR169m | TAGCCAAGGA | 21 | 0.76 | 1972 |
| | | | | | TGACTTGCCT | | | |
| | | | | | G/1162 | | | |
| | | | | ptc-miR169i | TAGCCAAGGA | 21 | 0.76 | 1973 |
| | | | | | TGACTTGCCT | | | |
| | | | | | G/1163 | | | |
| | | | | ptc-miR169j | TAGCCAAGGA | 21 | 0.76 | 1974 |
| | | | | | TGACTTGCCT | | | |
| | | | | | G/1164 | | | |
| | | | | ptc-miR169l | TAGCCAAGGA | 21 | 0.76 | 1975 |
| | | | | | TGACTTGCCT | | | |
| | | | | | G/1165 | | | |
| | | | | osa-miR169k | TAGCCAAGGA | 21 | 0.76 | 1976 |
| | | | | | TGACTTGCCT | | | |
| | | | | | G/1166 | | | |
| | | | | ath-miR169c | CAGCCAAGGA | 21 | 0.76 | 1977 |
| | | | | | TGACTTGCCG | | | |
| | | | | | G/1167 | | | |
| | | | | osa-miR169j | TAGCCAAGGA | 21 | 0.76 | 1978 |
| | | | | | TGACTTGCCT | | | |
| | | | | | G/1168 | | | |
| | | | | aly-miR169m | TAGCCAAGGA | 21 | 0.76 | 1979 |
| | | | | | TGACTTGCCT | | | |
| | | | | | G/1169 | | | |
| | | | | ath-miR169h | TAGCCAAGGA | 21 | 0.76 | 1980 |
| | | | | | TGACTTGCCT | | | |
| | | | | | G/1170 | | | |
| | | | | ptc-miR169e | CAGCCAAGGA | 21 | 0.76 | 1981 |
| | | | | | TGACTTGCCG | | | |
| | | | | | G/1171 | | | |
| | | | | ghb-miR169a | TAGCCAAGGA | 21 | 0.76 | 1982 |
| | | | | | TGACTTGCCT | | | |
| | | | | | G/1172 | | | |
| | | | | aqc-miR169b | TAGCCAAGGA | 21 | 0.76 | 1983 |
| | | | | | TGACTTGCCT | | | |
| | | | | | G/1173 | | | |
| | | | | ath-miR169m | TAGCCAAGGA | 21 | 0.76 | 1984 |
| | | | | | TGACTTGCCT | | | |
| | | | | | G/1174 | | | |
| | | | | aly-miR169h | TAGCCAAGGA | 21 | 0.76 | 1985 |
| | | | | | TGACTTGCCT | | | |
| | | | | | G/1175 | | | |
| | | | | rco-miR169b | CAGCCAAGGA | 21 | 0.76 | 1986 |
| | | | | | TGACTTGCCG | | | |
| | | | | | G/1176 | | | |
| | | | | aly-miR169l | TAGCCAAGGA | 21 | 0.76 | 1987 |
| | | | | | TGACTTGCCT | | | |
| | | | | | G/1177 | | | |
| | | | | bna-miR169j | TAGCCAAGGA | 22 | 0.76 | 1988 |
| | | | | | TGACTTGCCT | | | |
| | | | | | GC/1178 | | | |
| | | | | aly-miR169b | CAGCCAAGGA | 21 | 0.76 | 1989 |
| | | | | | TGACTTGCCG | | | |
| | | | | | G/1179 | | | |
| | | | | vvi-miR169e | TAGCCAAGGA | 22/21 | 0.76 | 1990 |
| | | | | | TGACTTGCCT | | | |
| | | | | | GC/1180/TAGC | | | |
| | | | | | CAAGGATGAC | | | |
| | | | | | TTGCCTG/1817 | | | |
| | | | | aly-miR169c | CAGCCAAGGA | 21 | 0.76 | 1991 |
| | | | | | TGACTTGCCG | | | |
| | | | | | G/ 1181 | | | |
| | | | | osa-miR169i | TAGCCAAGGA | 21 | 0.76 | 1992 |
| | | | | | TGACTTGCCT | | | |
| | | | | | G/1182 | | | |
| | | | | vvi-miR169w | CAGCCAAGGA | 21 | 0.76 | 1993 |
| | | | | | TGACTTGCCG | | | |
| | | | | | G/1183 | | | |
| | | | | bdi-miR169g | TAGCCAAGGA | 21 | 0.76 | 1994 |
| | | | | | TGACTTGCCT | | | |
| | | | | | G/1184 | | | |
| | | | | sly-miR169a | CAGCCAAGGA | 21 | 0.76 | 1995 |
| | | | | | TGACTTGCCG | | | |
| | | | | | G/1185 | | | |
| | | | | bdi-miR169f | CAGCCAAGGA | 21 | 0.76 | 1996 |
| | | | | | TGACTTGCCG | | | |
| | | | | | G/1186 | | | |
| | | | | vvi-miR169c | CAGCCAAGGA | 21 | 0.76 | 1997 |
| | | | | | TGACTTGCCG | | | |
| | | | | | G/1187 | | | |
| | | | | tcc-miR169b | CAGCCAAGGA | 21 | 0.76 | 1998 |
| | | | | | TGACTTGCCG | | | |
| | | | | | G/1188 | | | |
| | | | | zma-miR169j | TAGCCAAGGA | 21 | 0.76 | 1999 |
| | | | | | TGACTTGCCT | | | |
| | | | | | G/1189 | | | |
| | | | | sbi-miR169g | TAGCCAAGGA | 21 | 0.76 | 2000 |
| | | | | | TGACTTGCCT | | | |
| | | | | | G/1190 | | | |
| | | | | zma-miR169r | CAGCCAAGGA | 21 | 0.76 | 2629 |
| | | | | | TGACTTGCCG | | | |
| | | | | | G/1191 | | | |
| | | | | zma-miR169i | TAGCCAAGGA | 21 | 0.76 | 2002 |
| | | | | | TGACTTGCCT | | | |
| | | | | | G/1192 | | | |
| | | | | ath-miR169n | TAGCCAAGGA | 21 | 0.76 | 2003 |
| | | | | | TGACTTGCCT | | | |
| | | | | | G/1193 | | | |
| | | | | ptc-miR169h | CAGCCAAGGA | 21 | 0.76 | 2004 |
| | | | | | TGACTTGCCG | | | |
| | | | | | G/1194 | | | |
| | | | | mtr-miR169j | CAGCCAAGGA | 21 | 0.76 | 2005 |
| | | | | | TGACTTGCCG | | | |
| | | | | | G/1195 | | | |
| | | | | ptc-miR169d | CAGCCAAGGA | 21 | 0.76 | 2006 |
| | | | | | TGACTTGCCG | | | |
| | | | | | G/1196 | | | |
| | | | | ath-miR169j | TAGCCAAGGA | 21 | 0.76 | 2007 |
| | | | | | TGACTTGCCT | | | |
| | | | | | G/1197 | | | |
| | | | | ptc-miR169g | CAGCCAAGGA | 21 | 0.76 | 2008 |
| | | | | | TGACTTGCCG | | | |
| | | | | | G/1198 | | | |
| | | | | vvi-miR169j | CAGCCAAGGA | 21 | 0.76 | 2009 |
| | | | | | TGACTTGCCG | | | |
| | | | | | G/1199 | | | |
| | | | | vvi-miR169k | CAGCCAAGGA | 21 | 0.76 | 2010 |
| | | | | | TGACTTGCCG | | | |
| | | | | | G/1200 | | | |
| | | | | vvi-miR169a | CAGCCAAGGA | 21 | 0.76 | 2011 |
| | | | | | TGACTTGCCG | | | |
| | | | | | G/1201 | | | |
| | | | | tcc-miR169l | CAGCCAAGGA | 21 | 0.76 | 2012 |
| | | | | | TGACTTGCCG | | | |
| | | | | | G/1202 | | | |
| | | | | bna-miR169h | TAGCCAAGGA | 22 | 0.76 | 2013 |
| | | | | | TGACTTGCCT | | | |
| | | | | | GC/1203 | | | |
| | | | | bna-miR169g | TAGCCAAGGA | 22 | 0.76 | 2014 |
| | | | | | TGACTTGCCT | | | |
| | | | | | GC/1204 | | | |
| | | | | aly-miR169j | TAGCCAAGGA | 21 | 0.76 | 2015 |
| | | | | | TGACTTGCCT | | | |
| | | | | | G/1205 | | | |
| | | | | rco-miR169a | CAGCCAAGGA | 21 | 0.76 | 2016 |
| | | | | | TGACTTGCCG | | | |
| | | | | | G/1206 | | | |
| | | | | aly-miR169i | TAGCCAAGGA | 21 | 0.76 | 2017 |
| | | | | | TGACTTGCCT | | | |
| | | | | | G/1207 | | | |
| | | | | ath-miR169i | TAGCCAAGGA | 21 | 0.76 | 2018 |
| | | | | | TGACTTGCCT | | | |
| | | | | | G/1208 | | | |
| | | | | aly-miR169k | TAGCCAAGGA | 21 | 0.76 | 2019 |
| | | | | | TGACTTGCCT | | | |
| | | | | | G/1209 | | | |
| | | | | osa-miR169c | CAGCCAAGGA | 21 | 0.76 | 2020 |
| | | | | | TGACTTGCCG | | | |
| | | | | | G/1210 | | | |
| | | | | osa-miR169b | CAGCCAAGGA | 21 | 0.76 | 2021 |
| | | | | | TGACTTGCCG | | | |
| | | | | | G/1211 | | | |
| | | | | vvi-miR169s | CAGCCAAGGA | 21 | 0.76 | 2022 |
| | | | | | TGACTTGCCG | | | |
| | | | | | G/1212 | | | |
| | | | | bdi-miR169j | TAGCCAGGAA | 21 | 0.76 | 2023 |
| | | | | | TGGCTTGCCT | | | |
| | | | | | A/1213 | | | |
| | | | | zma-miR169k | TAGCCAAGGA | 21 | 0.76 | 2024 |
| | | | | | TGACTTGCCT | | | |
| | | | | | G/1214 | | | |
| | | | | sbi-miR169f | TAGCCAAGGA | 21 | 0.76 | 2025 |
| | | | | | TGACTTGCCT | | | |
| | | | | | G/1215 | | | |
| | | | | bdi-miR169e | TAGCCAAGGA | 21 | 0.76 | 2026 |
| | | | | | TGACTTGCCT | | | |
| | | | | | G/1216 | | | |
| | | | | ath-miR169b | CAGCCAAGGA | 21 | 0.76 | 2027 |
| | | | | | TGACTTGCCG | | | |
| | | | | | G/1217 | | | |
| | | | | bna-miR169l | TAGCCAAGGA | 22 | 0.76 | 2028 |
| | | | | | TGACTTGCCT | | | |
| | | | | | GC/1218 | | | |
| | | | | sbi-miR169k | CAGCCAAGGA | 21 | 0.76 | 2029 |
| | | | | | TGACTTGCCG | | | |
| | | | | | G/1219 | | | |
| | | | | gso-miR169a | CAGCCAAGGA | 21 | 0.76 | 2030 |
| | | | | | TGACTTGCCG | | | |
| | | | | | G/1220 | | | |
| | | | | gma-miR169p | CAGCCAAGGA | 21 | 0.76 | 2031 |
| | | | | | TGACTTGCCG | | | |
| | | | | | G/1221 | | | |
| | | | | sbi-miR169b | CAGCCAAGGA | 21 | 0.76 | 2032 |
| | | | | | TGACTTGCCG | | | |
| | | | | | G/1222 | | | |
| | | | | osa-miR169d | TAGCCAAGGA | 21 | 0.76 | 2033 |
| | | | | | TGAATTGCCG | | | |
| | | | | | G/1223 | | | |
| | | | | zma-miR169c | CAGCCAAGGA | 21 | 0.76 | 2034 |
| | | | | | TGACTTGCCG | | | |
| | | | | | G/1224 | | | |
| | | | | ath-miR169l | TAGCCAAGGA | 21 | 0.76 | 2035 |
| | | | | | TGACTTGCCT | | | |
| | | | | | G/1225 | | | |
| | | | | mtr-miR169g | CAGCCAAGGA | 21 | 0.76 | 2036 |
| | | | | | TGACTTGCCG | | | |
| | | | | | G/1226 | | | |
| | | | | phy-miR169 | CAGCCAAGGA | 21 | 0.76 | 2037 |
| | | | | | TGACTTGCCG | | | |
| | | | | | G/1227 | | | |
| | | | | tcc-miR169h | TAGCCAAGGA | 21 | 0.76 | 2038 |
| | | | | | TGACTTGCCT | | | |
| | | | | | G/1228 | | | |
| | | | | tcc-miR169j | TAGCCAAGGA | 21 | 0.76 | 2039 |
| | | | | | TGACTTGCCT | | | |
| | | | | | G/1229 | | | |
| | | | | bna-miR169i | TAGCCAAGGA | 22 | 0.76 | 2040 |
| | | | | | TGACTTGCCT | | | |
| | | | | | GC/1230 | | | |
| | | | | aqc-miR169c | CAGCCAAGGA | 21 | 0.76 | 2041 |
| | | | | | TGACTTGCCG | | | |
| | | | | | G/1231 | | | |
| | | | | tcc-miR169k | CAGCCAAGGA | 21 | 0.76 | 2042 |
| | | | | | TGACTTGCCG | | | |
| | | | | | G/1232 | | | |
| | | | | gma-miR169a | CAGCCAAGGA | 21 | 0.76 | 2043 |
| | | | | | TGACTTGCCG | | | |
| | | | | | G/1233 | | | |
| | | | | bna-miR169k | TAGCCAAGGA | 22 | 0.76 | 2044 |
| | | | | | TGACTTGCCT | | | |
| | | | | | GC/1234 | | | |
| | | | | bna-miR169a | CAGCCAAGGA | 21 | 0.71 | 2045 |
| | | | | | TGACTTGCCG | | | |
| | | | | | A/1235 | | | |
| | | | | sbi-miR169d | TAGCCAAGGA | 21 | 0.71 | 2630 |
| | | | | | TGACTTGCCT | | | |
| | | | | | A/1236 | | | |
| | | | | sbi-miR169c | TAGCCAAGGA | 21 | 0.71 | 2047 |
| | | | | | TGACTTGCCT | | | |
| | | | | | A/1237 | | | |
| | | | | bdi-miR169i | CCAGCCAAGA | 22 | 0.71 | 2048 |
| | | | | | ATGGCTTGCC | | | |
| | | | | | TA/1238 | | | |
| | | | | ptc-miR169x | TAGCCAAGGA | 21 | 0.71 | 2049 |
| | | | | | TGACTTGCTC | | | |
| | | | | | G/1239 | | | |
| | | | | bdi-miR169k | TAGCCAAGGA | 22 | 0.71 | 2050 |
| | | | | | TGATTTGCCT | | | |
| | | | | | GT/1240 | | | |
| | | | | ptc-miR169q | TAGCCAAGGA | 21 | 0.71 | 2051 |
| | | | | | CGACTTGCCT | | | |
| | | | | | G/1241 | | | |
| | | | | gma-miR169b | CAGCCAAGGA | 21 | 0.71 | 2052 |
| | | | | | TGACTTGCCG | | | |
| | | | | | A/1242 | | | |
| | | | | zma-miR169a | CAGCCAAGGA | 21 | 0.71 | 2053 |
| | | | | | TGACTTGCCG | | | |
| | | | | | A/1243 | | | |
| | | | | zma-miR169b | CAGCCAAGGA | 21 | 0.71 | 2054 |
| | | | | | TGACTTGCCG | | | |
| | | | | | A/1244 | | | |
| | | | | tcc-miR169c | CAGCCAAGGA | 21 | 0.71 | 2055 |
| | | | | | TGACTTGCCG | | | |
| | | | | | A/1245 | | | |
| | | | | tcc-miR169e | CAGCCAAGGA | 21 | 0.71 | 2056 |
| | | | | | TGACTTGCCG | | | |
| | | | | | A/1246 | | | |
| | | | | tcc-miR169a | CAGCCAAGGA | 21 | 0.71 | 2057 |
| | | | | | TGACTTGCCG | | | |
| | | | | | A/1247 | | | |
| | | | | sbi-miR169m | TAGCCAAGGA | 21 | 0.71 | 2058 |
| | | | | | TGACTTGCCT | | | |
| | | | | | A/1248 | | | |
| | | | | bna-miR169e | TAGCCAAGGA | 21 | 0.71 | 2631 |
| | | | | | TGACTTGCCT | | | |
| | | | | | A/1249 | | | |
| | | | | ath-miR169a | CAGCCAAGGA | 21 | 0.71 | 2060 |
| | | | | | TGACTTGCCG | | | |
| | | | | | A/1250 | | | |
| | | | | bna-miR169b | CAGCCAAGGA | 21 | 0.71 | 2061 |
| | | | | | TGACTTGCCG | | | |
| | | | | | A/1251 | | | |
| | | | | vvi-miR169x | TAGCCAAGGA | 21 | 0.71 | 2062 |
| | | | | | TGACTTGCCT | | | |
| | | | | | A/1252 | | | |
| | | | | sly-miR169c | CAGCCAAGGA | 21 | 0.71 | 2063 |
| | | | | | TGACTTGCCG | | | |
| | | | | | A/1253 | | | |
| | | | | bna-miR169f | TAGCCAAGGA | 21 | 0.71 | 2064 |
| | | | | | TGACTTGCCT | | | |
| | | | | | A/1254 | | | |
| | | | | sbi-miR169n | TAGCCAAGGA | 21 | 0.71 | 2065 |
| | | | | | TGACTTGCCT | | | |
| | | | | | A/1255 | | | |
| | | | | far-miR169 | TAGCCAAGGA | 21 | 0.71 | 2066 |
| | | | | | TGACTTGCCT | | | |
| | | | | | A/1256 | | | |
| | | | | bdi-miR169a | CAGCCAAGGA | 21 | 0.71 | 2632 |
| | | | | | TGACTTGCCG | | | |
| | | | | | A/1257 | | | |
| | | | | osa-miR169f | TAGCCAAGGA | 21 | 0.71 | 2068 |
| | | | | | TGACTTGCCT | | | |
| | | | | | A/1258 | | | |
| | | | | aqc-miR169a | TAGCCAAGGA | 21 | 0.71 | 2069 |
| | | | | | TGACTTGCCT | | | |
| | | | | | A/1259 | | | |
| | | | | vvi-miR169f | CAGCCAAGGA | 21 | 0.71 | 2070 |
| | | | | | TGACTTGCCG | | | |
| | | | | | A/1260 | | | |
| | | | | ata-miR169 | TAGCCAAGGA | 21 | 0.71 | 2071 |
| | | | | | TGAATTGCCA | | | |
| | | | | | G/1261 | | | |
| | | | | ptc-miR169r | TAGCCAAGGA | 21 | 0.71 | 2072 |
| | | | | | TGACTTGCCT | | | |
| | | | | | A/1262 | | | |
| | | | | osa-miR169p | TAGCCAAGGA | 22 | 0.71 | 2073 |
| | | | | | CAAACTTGCC | | | |
| | | | | | GG/1263 | | | |
| | | | | aly-miR169n | TAGCCAAAGA | 21 | 0.71 | 2074 |
| | | | | | TGACTTGCCT | | | |
| | | | | | G/1264 | | | |
| | | | | bna-miR169d | TAGCCAAGGA | 21 | 0.71 | 2075 |
| | | | | | TGACTTGCCT | | | |
| | | | | | A/1265 | | | |
| | | | | sly-miR169d | TAGCCAAGGA | 21 | 0.71 | 2076 |
| | | | | | TGACTTGCCT | | | |
| | | | | | A/1266 | | | |
| | | | | vvi-miR169g | CAGCCAAGGA | 21 | 0.71 | 2077 |
| | | | | | TGACTTGCCG | | | |
| | | | | | A/1267 | | | |
| | | | | bdi-miR169h | TAGCCAAGGA | 21 | 0.71 | 2078 |
| | | | | | TGACTTGCCT | | | |
| | | | | | A/1268 | | | |
| | | | | osa-miR169g | TAGCCAAGGA | 21 | 0.71 | 2079 |
| | | | | | TGACTTGCCT | | | |
| | | | | | A/1269 | | | |
| | | | | ptc-miR169w | TAGCCAAGGA | 21 | 0.71 | 2080 |
| | | | | | TGACTTGCCC | | | |
| | | | | | A/1270 | | | |
| | | | | ptc-miR169v | TAGCCAAGGA | 21 | 0.71 | 2081 |
| | | | | | TGACTTGCCC | | | |
| | | | | | A/1271 | | | |
| | | | | osa-miR169a | CAGCCAAGGA | 21 | 0.71 | 2082 |
| | | | | | TGACTTGCCG | | | |
| | | | | | A/1272 | | | |
| | | | | zma-miR169t | CAGCCAAGGA | 21 | 0.71 | 2083 |
| | | | | | TGACTTGCCG | | | |
| | | | | | A/1273 | | | |
| | | | | zma-miR169u | CAGCCAAGGA | 21 | 0.71 | 2084 |
| | | | | | TGACTTGCCG | | | |
| | | | | | A/1274 | | | |
| | | | | sbi-miR169a | CAGCCAAGGA | 21 | 0.71 | 2633 |
| | | | | | TGACTTGCCG | | | |
| | | | | | A/1275 | | | |
| | | | | ptr-miR169a | CAGCCAAGGA | 21 | 0.71 | 2086 |
| | | | | | TGACTTGCCG | | | |
| | | | | | A/1276 | | | |
| | | | | zma-miR169s | CAGCCAAGGA | 21 | 0.71 | 2087 |
| | | | | | TGACTTGCCG | | | |
| | | | | | A/1277 | | | |
| | | | | zma-miR169g | TAGCCAAGGA | 21 | 0.71 | 2088 |
| | | | | | TGACTTGCCT | | | |
| | | | | | A/1278 | | | |
| | | | | zma-miR169h | TAGCCAAGGA | 21 | 0.71 | 2089 |
| | | | | | TGACTTGCCT | | | |
| | | | | | A/1279 | | | |
| | | | | sbi-miR169o | TAGCCAAGGA | 21 | 0.71 | 2090 |
| | | | | | TGATTTGCCT | | | |
| | | | | | G/1280 | | | |
| | | | | tcc-miR169d | TAGCCAAGGA | 21 | 0.71 | 2091 |
| | | | | | TGACTTGCCT | | | |
| | | | | | A/1281 | | | |
| | | | | bna-miR169c | TAGCCAAGGA | 21 | 0.71 | 2092 |
| | | | | | TGACTTGCCT | | | |
| | | | | | A/1282 | | | |
| | | | | psl-miR169 | AGCCAAAAAT | 20 | 0.71 | 2093 |
| | | | | | GACTTGCTGC/ | | | |
| | | | | | 1283 | | | |
| | | | | zma-miR169f | TAGCCAAGGA | 21 | 0.71 | 2094 |
| | | | | | TGACTTGCCT | | | |
| | | | | | A/1284 | | | |
| | | | | ptc-miR169c | CAGCCAAGGA | 21 | 0.71 | 2095 |
| | | | | | TGACTTGCCG | | | |
| | | | | | A/1285 | | | |
| | | | | ptc-miR169a | CAGCCAAGGA | 21 | 0.71 | 2096 |
| | | | | | TGACTTGCCG | | | |
| | | | | | A/1286 | | | |
| | | | | ptc-miR169b | CAGCCAAGGA | 21 | 0.71 | 2097 |
| | | | | | TGACTTGCCG | | | |
| | | | | | A/1287 | | | |
| | | | | tcc-miR169i | TAGCCAAGGA | 21 | 0.71 | 2098 |
| | | | | | TGAGTTGCCT | | | |
| | | | | | G/1288 | | | |
| | | | | mtr-miR169b | CAGCCAAGGA | 21 | 0.71 | 2099 |
| | | | | | TGACTTGCCG | | | |
| | | | | | A/1289 | | | |
| | | | | mtr-miR169a | CAGCCAAGGA | 21 | 0.71 | 2100 |
| | | | | | TGACTTGCCG | | | |
| | | | | | A/1290 | | | |
| | | | | aly-miR169a | CAGCCAAGGA | 21 | 0.71 | 2101 |
| | | | | | TGACTTGCCG | | | |
| | | | | | A/1291 | | | |
| | | | | ptc-miR169ac | TAGCCAAGGA | 21 | 0.67 | 2102 |
| | | | | | CGACTTGCCC | | | |
| | | | | | A/1292 | | | |
| | | | | ptc-miR169z | CAGCCAAGAA | 21 | 0.67 | 2103 |
| | | | | | TGATTTGCCG | | | |
| | | | | | G/1293 | | | |
| | | | | ptc-miR169ad | TAGCCAAGGA | 21 | 0.67 | 2104 |
| | | | | | CGACTTGCCC | | | |
| | | | | | A/1294 | | | |
| | | | | sbi-miR169i | TAGCCAAGAA | 21 | 0.67 | 2105 |
| | | | | | TGACTTGCCT | | | |
| | | | | | A/1295 | | | |
| | | | | tcc-miR169g | TAGCCAGGGA | 21 | 0.67 | 2106 |
| | | | | | TGACTTGCCT | | | |
| | | | | | A/1296 | | | |
| | | | | vvi-miR169d | CAGCCAAGAA | 21 | 0.67 | 2107 |
| | | | | | TGATTTGCCG | | | |
| | | | | | G/1297 | | | |
| | | | | ptc-miR169u | TAGCCAAGGA | 21 | 0.67 | 2108 |
| | | | | | CGACTTGCCT | | | |
| | | | | | A/1298 | | | |
| | | | | ghr-miR169 | ACGCCAAGGA | 21 | 0.67 | 2109 |
| | | | | | TGTCTTGCGT | | | |
| | | | | | C/1299 | | | |
| | | | | mtr-miR169k | CAGCCAAGGG | 21 | 0.67 | 2110 |
| | | | | | TGATTTGCCG | | | |
| | | | | | G/1300 | | | |
| | | | | ptc-miR169ae | TAGCCAAGGA | 21 | 0.67 | 2111 |
| | | | | | CGACTTGCCC | | | |
| | | | | | A/1301 | | | |
| | | | | ptc-miR169ab | TAGCCAAGGA | 21 | 0.67 | 2112 |
| | | | | | CGACTTGCCC | | | |
| | | | | | A/1302 | | | |
| | | | | osa-miR169n | TAGCCAAGAA | 21 | 0.67 | 2113 |
| | | | | | TGACTTGCCT | | | |
| | | | | | A/1303 | | | |
| | | | | osa-miR169o | TAGCCAAGAA | 21 | 0.67 | 2114 |
| | | | | | TGACTTGCCT | | | |
| | | | | | A/1304 | | | |
| | | | | vvi-miR169y | TAGCGAAGGA | 21 | 0.67 | 2115 |
| | | | | | TGACTTGCCT | | | |
| | | | | | A/1305 | | | |
| | | | | ptc-miR169af | TAGCCAAGGA | 21 | 0.67 | 2116 |
| | | | | | CGACTTGCCC | | | |
| | | | | | A/1306 | | | |
| | | | | ptr-miR169b | CAGCCAAGGA | 21 | 0.67 | 2117 |
| | | | | | TGATTTGCCG | | | |
| | | | | | A/1307 | | | |
| | | | | bdi-miR169d | TAGCCAAGAA | 21 | 0.67 | 2118 |
| | | | | | TGACTTGCCT | | | |
| | | | | | A/1308 | | | |
| | | | | sbi-miR169q | TAGCCAAGAA | 21 | 0.62 | 2119 |
| | | | | | TGGCTTGCCT | | | |
| | | | | | A/1309 | | | |
| | | | | sbi-miR169p | TAGCCAAGAA | 21 | 0.62 | 2120 |
| | | | | | TGGCTTGCCT | | | |
| | | | | | A/1310 | | | |
| | | | | ath-miR169g* | TCCGGCAAGT | 21 | 0.62 | 2121 |
| | | | | | TGACCTTGGC | | | |
| | | | | | T/1311 | | | |
| | | | | mtr-miR169d | AAGCCAAGGA | 21 | 0.90/ | 2634; |
| | | | | | TGACTTGCCG | | 0.86 | 2122 |
| | | | | | G/ 1312; | | | |
| | | | | | AAGCCAAGGA6 | | | |
| | | | | | TGACTTGCTG | | | |
| | | | | | G/ 1818 | | | |
| | | | | sbi-miR169e | TAGCCAAGGA | 21 | 0.81/ | 2635; |
| | | | | | TGACTTGCCG | | 0.76 | 2123 |
| | | | | | G/ 1313; | | | |
| | | | | | TAGCCAAGGA | | | |
| | | | | | TGACTTGCCT | | | |
| | | | | | G/ 1819 | | | |
| | | | | sbi-miR169l | TAGCCAAGGA | 21 | 0.76/ | 2636; |
| | | | | | TGACTTGCCT | | 0.52 | 2124 |
| | | | | | G/ 1314; | | | |
| | | | | | TAGCCAAGGA | | | |
| | | | | | GACTGCCTAT | | | |
| | | | | | G/ 1820 | | | |
| | | | | sbi-miR169h | TAGCCAAGGA | 21 | 0.71/ | 2637; |
| | | | | | TGACTTGCCT | | 0.76 | 2125 |
| | | | | | A/ 1315 | | | |
| | | | | | TAGCCAAGGA | | | |
| | | | | | TGACTTGCCT | | | |
| | | | | | G/ 1821 | | | |
| | | | | zma-miR169o | TAGCCAAGAA | 21 | 0.67/ | 2638; |
| | | | | | TGACTTGCCT | | 0.81 | 2126 |
| | | | | | A/ 1316; | | | |
| | | | | | TAGCCAAGGA | | | |
| | | | | | TGACTTGCCG | | | |
| | | | | | G/ 1822 | | | |
| | | | | zma-miR169l | TAGCCAGGGA | 21 | 0.67/ | 2639; |
| | | | | | TGATTTGCCT | | 0.71 | 2127 |
| | | | | | G/ 1317; | | | |
| | | | | | TAGCCAAGGA | | | |
| | | | | | TGACTTGCCT | | | |
| | | | | | A/ 1823 | | | |
| | | | | mtr-miR169c | CAGCCAAGGG | 21 | 0.67/ | 2640; |
| | | | | | TGATTTGCCG | | 0.71 | 2128 |
| | | | | | G/ 1318; | | | |
| | | | | | TAGCCAAGGA | | | |
| | | | | | CAACTTGCCG | | | |
| | | | | | G/ 1824 | | | |
| | | | | zma-miR169q | TAGCCAAGAA | 21 | 0.62/ | 2641; |
| | | | | | TGGCTTGCCT | | 0.81 | 2129 |
| | | | | | A/ 1319; | | | |
| | | | | | TAGCCAAGGA | | | |
| | | | | | TGACTTGCCG | | | |
| | | | | | G/ 1825 | | | |
| | | | | zma-miR169n | TAGCCAAGAA | 21 | 0.62/ | 2642; |
| | | | | | TGGCTTGCCT | | 0.81 | 2130 |
| | | | | | A/ 1320; | | | |
| | | | | | TAGCCAAGGA | | | |
| | | | | | TGACTTGCCG | | | |
| | | | | | G/ 1826 | | | |
| | | | | zma- | TAGCCAAGAA | 21 | 0.62/ | 2643; |
| | | | | miR169m | TGGCTTGCCT | | 0.71 | 2131 |
| | | | | | A/ 1321; | | | |
| | | | | | TAGCCAAGGA | | | |
| | | | | | TGACTTGCCT | | | |
| | | | | | A/ 1827 | | | |
| zma- | TGCCA | 21 | 271 | sbi-miR399k | TGCCAAAGGG | 21 | 1 | 2132 |
| miR39 | AAGGG | | | | GATTTGCCCG | | | |
| 9g | GATTT | | | | G/1322 | | | |
| | GCCCG | | | aly-miR399a | TGCCAAAGGA | 21 | 0.95 | 2133 |
| | G/118 | | | | GATTTGCCCG | | | |
| | | | | | G/1323 | | | |
| | | | | aly-miR399h | TGCCAAAGGA | 21 | 0.95 | 2134 |
| | | | | | GATTTGCCCG | | | |
| | | | | | G/1324 | | | |
| | | | | aly-miR399j | TGCCAAAGGA | 21 | 0.95 | 2135 |
| | | | | | GATTTGCCCG | | | |
| | | | | | G/1325 | | | |
| | | | | ath-miR399f | TGCCAAAGGA | 21 | 0.95 | 2136 |
| | | | | | GATTTGCCCG | | | |
| | | | | | G/1326 | | | |
| | | | | bna-miR399 | TGCCAAAGGA | 21 | 0.95 | 2137 |
| | | | | | GATTTGCCCG | | | |
| | | | | | G/1327 | | | |
| | | | | csi-miR399a | TGCCAAAGGA | 21 | 0.95 | 2138 |
| | | | | | GATTTGCCCG | | | |
| | | | | | G/1328 | | | |
| | | | | ptc-miR399b | TGCCAAAGGA | 21 | 0.95 | 2139 |
| | | | | | GATTTGCCCG | | | |
| | | | | | G/1329 | | | |
| | | | | ptc-miR399c | TGCCAAAGGA | 21 | 0.95 | 2140 |
| | | | | | GATTTGCCCG | | | |
| | | | | | G/1330 | | | |
| | | | | rco-miR399b | TGCCAAAGGA | 21 | 0.95 | 2141 |
| | | | | | GATTTGCCCG | | | |
| | | | | | G/1331 | | | |
| | | | | rco-miR399c | TGCCAAAGGA | 21 | 0.95 | 2142 |
| | | | | | GATTTGCCCG | | | |
| | | | | | G/1332 | | | |
| | | | | tcc-miR399b | TGCCAAAGGA | 21 | 0.95 | 2143 |
| | | | | | GATTTGCCCG | | | |
| | | | | | G/1333 | | | |
| | | | | tcc-miR399d | TGCCAAAGGA | 21 | 0.95 | 2144 |
| | | | | | GATTTGCCCG | | | |
| | | | | | G/1334 | | | |
| | | | | vvi-miR399e | TGCCAAAGGA | 21 | 0.95 | 2145 |
| | | | | | GATTTGCCCG | | | |
| | | | | | G/1335 | | | |
| | | | | aly-miR399d | TGCCAAAGGA | 21 | 0.9 | 2146 |
| | | | | | GATTTGCCCC | | | |
| | | | | | G/1336 | | | |
| | | | | aly-miR399f | TGCCAAAGGA | 21 | 0.9 | 2147 |
| | | | | | GATTTGCCCT | | | |
| | | | | | G/1337 | | | |
| | | | | aly-miR399g | TGCCAAAGGA | 21 | 0.9 | 2148 |
| | | | | | GATTTGCCCC | | | |
| | | | | | G/1338 | | | |
| | | | | aly-miR399i | TGCCAAAGGA | 21 | 0.9 | 2149 |
| | | | | | GATTTGCCCC | | | |
| | | | | | G/1339 | | | |
| | | | | ath-miR399a | TGCCAAAGGA | 21 | 0.9 | 2150 |
| | | | | | GATTTGCCCT | | | |
| | | | | | G/1340 | | | |
| | | | | ath-miR399d | TGCCAAAGGA | 21 | 0.9 | 2151 |
| | | | | | GATTTGCCCC | | | |
| | | | | | G/1341 | | | |
| | | | | ghr-miR399d | TGCCAAAGGA | 21 | 0.9 | 2152 |
| | | | | | GATTTGCCCT | | | |
| | | | | | G/1342 | | | |
| | | | | hvu-miR399 | TGCCAAAGGA | 21 | 0.9 | 2153 |
| | | | | | GATTTGCCCC | | | |
| | | | | | G/1343 | | | |
| | | | | mtr-miR399a | TGCCAAAGGA | 21 | 0.9 | 2154 |
| | | | | | GATTTGCCCA | | | |
| | | | | | G/1344 | | | |
| | | | | mtr-miR399c | TGCCAAAGGA | 21 | 0.9 | 2155 |
| | | | | | GATTTGCCCT | | | |
| | | | | | G/1345 | | | |
| | | | | mtr-miR399e | TGCCAAAGGA | 21 | 0.9 | 2156 |
| | | | | | GATTTGCCCA | | | |
| | | | | | G/1346 | | | |
| | | | | mtr-miR399f | TGCCAAAGGA | 21 | 0.9 | 2157 |
| | | | | | GATTTGCCCA | | | |
| | | | | | G/1347 | | | |
| | | | | mtr-miR399g | TGCCAAAGGA | 21 | 0.9 | 2158 |
| | | | | | GATTTGCCCA | | | |
| | | | | | G/1348 | | | |
| | | | | mtr-miR399h | TGCCAAAGGA | 21 | 0.9 | 2159 |
| | | | | | GATTTGCCCT | | | |
| | | | | | G/1349 | | | |
| | | | | mtr-miR399i | TGCCAAAGGA | 21 | 0.9 | 2160 |
| | | | | | GATTTGCCCT | | | |
| | | | | | G/1350 | | | |
| | | | | osa-miR399e | TGCCAAAGGA | 21 | 0.9 | 2161 |
| | | | | | GATTTGCCCA | | | |
| | | | | | G/1351 | | | |
| | | | | osa-miR399f | TGCCAAAGGA | 21 | 0.9 | 2162 |
| | | | | | GATTTGCCCA | | | |
| | | | | | G/1352 | | | |
| | | | | osa-miR399g | TGCCAAAGGA | 21 | 0.9 | 2163 |
| | | | | | GATTTGCCCA | | | |
| | | | | | G/1353 | | | |
| | | | | ptc-miR399a | TGCCAAAGGA | 21 | 0.9 | 2164 |
| | | | | | GATTTGCCCC | | | |
| | | | | | G/1354 | | | |
| | | | | ptc-miR399j | TGCCAAAGGA | 21 | 0.9 | 2165 |
| | | | | | GATTTGTCCG | | | |
| | | | | | G/1355 | | | |
| | | | | rco-miR399e | TGCCAAAGGA | 21 | 0.9 | 2166 |
| | | | | | GATTTGCCCA | | | |
| | | | | | G/1356 | | | |
| | | | | sbi-miR399e | TGCCAAAGGA | 21 | 0.9 | 2167 |
| | | | | | GATTTGCCCA | | | |
| | | | | | G/1357 | | | |
| | | | | sbi-miR399f | TGCCAAAGGA | 21 | 0.9 | 2168 |
| | | | | | GATTTGCCCA | | | |
| | | | | | G/1358 | | | |
| | | | | tcc-miR399h | TGCCAAAGGA | 21 | 0.9 | 2169 |
| | | | | | GATTTGCCCC | | | |
| | | | | | G/1359 | | | |
| | | | | aly-miR399b | TGCCAAAGGA | 21 | 0.86 | 2170 |
| | | | | | GAGTTGCCCT | | | |
| | | | | | G/1360 | | | |
| | | | | aly-miR399c | TGCCAAAGGA | 21 | 0.86 | 2171 |
| | | | | | GAGTTGCCCT | | | |
| | | | | | G/1361 | | | |
| | | | | aly-miR399e | TGCCAAAGGA | 21 | 0.86 | 2172 |
| | | | | | GATTTGCCTC | | | |
| | | | | | G/1362 | | | |
| | | | | ath-miR399b | TGCCAAAGGA | 21 | 0.86 | 2173 |
| | | | | | GAGTTGCCCT | | | |
| | | | | | G/1363 | | | |
| | | | | ath-miR399c | TGCCAAAGGA | 21 | 0.86 | 2174 |
| | | | | | GAGTTGCCCT | | | |
| | | | | | G/1364 | | | |
| | | | | ath-miR399e | TGCCAAAGGA | 21 | 0.86 | 2175 |
| | | | | | GATTTGCCTC | | | |
| | | | | | G/1365 | | | |
| | | | | bdi-miR399b | TGCCAAAGGA | 21 | 0.86 | 2176 |
| | | | | | GAATTGCCCT | | | |
| | | | | | G/1366 | | | |
| | | | | csi-miR399c | TGCCAAAGGA | 21 | 0.86 | 2177 |
| | | | | | GAATTGCCCT | | | |
| | | | | | G/1367 | | | |
| | | | | csi-miR399d | TGCCAAAGGA | 21 | 0.86 | 2178 |
| | | | | | GAGTTGCCCT | | | |
| | | | | | G/1368 | | | |
| | | | | csi-miR399e | TGCCAAAGGA | 21 | 0.86 | 2179 |
| | | | | | GAATTGCCCT | | | |
| | | | | | G/1369 | | | |
| | | | | mtr-miR399k | TGCCAAAGAA | 21 | 0.86 | 2180 |
| | | | | | GATTTGCCCT | | | |
| | | | | | G/1370 | | | |
| | | | | mtr-miR399l | TGCCAAAGGA | 21 | 0.86 | 2181 |
| | | | | | GAGTTGCCCT | | | |
| | | | | | G/1371 | | | |
| | | | | mtr-miR399p | TGCCAAAGGA | 21 | 0.86 | 2182 |
| | | | | | GAGTTGCCCT | | | |
| | | | | | G/1372 | | | |
| | | | | osa-miR399a | TGCCAAAGGA | 21 | 0.86 | 2183 |
| | | | | | GAATTGCCCT | | | |
| | | | | | G/1373 | | | |
| | | | | osa-miR399b | TGCCAAAGGA | 21 | 0.86 | 2184 |
| | | | | | GAATTGCCCT | | | |
| | | | | | G/1374 | | | |
| | | | | osa-miR399c | TGCCAAAGGA | 21 | 0.86 | 2185 |
| | | | | | GAATTGCCCT | | | |
| | | | | | G/1375 | | | |
| | | | | osa-miR399d | TGCCAAAGGA | 21 | 0.86 | 2186 |
| | | | | | GAGTTGCCCT | | | |
| | | | | | G/1376 | | | |
| | | | | osa-miR399h | TGCCAAAGGA | 21 | 0.86 | 2187 |
| | | | | | GACTTGCCCA | | | |
| | | | | | G/1377 | | | |
| | | | | osa-miR399k | TGCCAAAGGA | 21 | 0.86 | 2188 |
| | | | | | AATTTGCCCC | | | |
| | | | | | G/1378 | | | |
| | | | | ptc-miR399d | TGCCAAAGAA | 21 | 0.86 | 2189 |
| | | | | | GATTTGCCCC | | | |
| | | | | | G/1379 | | | |
| | | | | ptc-miR399e | TGCCAAAGAA | 21 | 0.86 | 2190 |
| | | | | | GATTTGCCCC | | | |
| | | | | | G/1380 | | | |
| | | | | ptc-miR399f | TGCCAAAGGA | 21 | 0.86 | 2191 |
| | | | | | GAATTGCCCT | | | |
| | | | | | G/1381 | | | |
| | | | | ptc-miR399g | TGCCAAAGGA | 21 | 0.86 | 2192 |
| | | | | | GAATTGCCCT | | | |
| | | | | | G/1382 | | | |
| | | | | pvu-miR399a | TGCCAAAGGA | 21 | 0.86 | 2193 |
| | | | | | GAGTTGCCCT | | | |
| | | | | | G/1383 | | | |
| | | | | rco-miR399a | TGCCAAAGGA | 21 | 0.86 | 2194 |
| | | | | | GAGTTGCCCT | | | |
| | | | | | G/1384 | | | |
| | | | | sbi-miR399a | TGCCAAAGGA | 21 | 0.86 | 2195 |
| | | | | | GAATTGCCCT | | | |
| | | | | | G/1385 | | | |
| | | | | sbi-miR399c | TGCCAAAGGA | 21 | 0.86 | 2196 |
| | | | | | GAATTGCCCT | | | |
| | | | | | G/1386 | | | |
| | | | | sbi-miR399d | TGCCAAAGGA | 21 | 0.86 | 2197 |
| | | | | | GAGTTGCCCT | | | |
| | | | | | G/1387 | | | |
| | | | | sbi-miR399g | TGCCAAAGGA | 21 | 0.86 | 2198 |
| | | | | | AATTTGCCCC | | | |
| | | | | | G/1388 | | | |
| | | | | sbi-miR399h | TGCCAAAGGA | 21 | 0.86 | 2199 |
| | | | | | GAATTGCCCT | | | |
| | | | | | G/1389 | | | |
| | | | | sbi-miR399i | TGCCAAAGGA | 21 | 0.86 | 2200 |
| | | | | | GAGTTGCCCT | | | |
| | | | | | G/1390 | | | |
| | | | | sbi-miR399j | TGCCAAAGGA | 21 | 0.86 | 2201 |
| | | | | | GAATTGCCCT | | | |
| | | | | | G/1391 | | | |
| | | | | tcc-miR399c | TGCCAATGGA | 21 | 0.86 | 2202 |
| | | | | | GATTTGCCCA | | | |
| | | | | | G/1392 | | | |
| | | | | tcc-miR399f | TGCCAGAGGA | 21 | 0.86 | 2203 |
| | | | | | GATTTGCCCT | | | |
| | | | | | G/1393 | | | |
| | | | | tcc-miR399g | TGCCAAAGGA | 21 | 0.86 | 2204 |
| | | | | | GAATTGCCCT | | | |
| | | | | | G/1394 | | | |
| | | | | tcc-miR399i | TGCCAAAGGA | 21 | 0.86 | 2205 |
| | | | | | GAGTTGCCCT | | | |
| | | | | | G/1395 | | | |
| | | | | vvi-miR399a | TGCCAAAGGA | 21 | 0.86 | 2206 |
| | | | | | GAATTGCCCT | | | |
| | | | | | G/1396 | | | |
| | | | | vvi-miR399b | TGCCAAAGGA | 21 | 0.86 | 2207 |
| | | | | | GAGTTGCCCT | | | |
| | | | | | G/1397 | | | |
| | | | | vvi-miR399c | TGCCAAAGGA | 21 | 0.86 | 2208 |
| | | | | | GAGTTGCCCT | | | |
| | | | | | G/1398 | | | |
| | | | | vvi-miR399d | TGCCAAAGGA | 21 | 0.86 | 2209 |
| | | | | | GATTTGCTCG | | | |
| | | | | | T/1399 | | | |
| | | | | vvi-miR399g | TGCCAAAGGA | 21 | 0.86 | 2210 |
| | | | | | GATTTGCCCC | | | |
| | | | | | T/1400 | | | |
| | | | | vvi-miR399h | TGCCAAAGGA | 21 | 0.86 | 2211 |
| | | | | | GAATTGCCCT | | | |
| | | | | | G/1401 | | | |
| | | | | zma-miR399a | TGCCAAAGGA | 21 | 0.86 | 2212 |
| | | | | | GAATTGCCCT | | | |
| | | | | | G/1402 | | | |
| | | | | zma-miR399c | TGCCAAAGGA | 21 | 0.86 | 2213 |
| | | | | | GAATTGCCCT | | | |
| | | | | | G/1403 | | | |
| | | | | zma-miR399e | TGCCAAAGGA | 21 | 0.86 | 2214 |
| | | | | | GAGTTGCCCT | | | |
| | | | | | G/1404 | | | |
| | | | | zma-miR399f | TGCCAAAGGA | 21 | 0.86 | 2215 |
| | | | | | AATTTGCCCC | | | |
| | | | | | G/1405 | | | |
| | | | | zma-miR399h | TGCCAAAGGA | 21 | 0.86 | 2216 |
| | | | | | GAATTGCCCT | | | |
| | | | | | G/1406 | | | |
| | | | | zma-miR399i | TGCCAAAGGA | 21 | 0.86 | 2217 |
| | | | | | GAGTTGCCCT | | | |
| | | | | | G/1407 | | | |
| | | | | zma-miR399j | TGCCAAAGGA | 21 | 0.86 | 2218 |
| | | | | | GAGTTGCCCT | | | |
| | | | | | G/1408 | | | |
| | | | | aqc-miR399 | TGCCAAAGGA | 21 | 0.81 | 2219 |
| | | | | | GAGTTGCCCT | | | |
| | | | | | A/1409 | | | |
| | | | | bdi-miR399 | TGCCAAAGGA | 21 | 0.81 | 2220 |
| | | | | | GAATTACCCT | | | |
| | | | | | G/1410 | | | |
| | | | | csi-miR399b | TGCCAAAGGA | 21 | 0.81 | 2221 |
| | | | | | GAGTTGCCCT | | | |
| | | | | | A/1411 | | | |
| | | | | ghr-miR399a | CGCCAATGGA | 21 | 0.81 | 2222 |
| | | | | | GATTTGTCCG | | | |
| | | | | | G/1412 | | | |
| | | | | ghr-miR399b | CGCCAATGGA | 21 | 0.81 | 2223 |
| | | | | | GATTTGTCCG | | | |
| | | | | | G/1413 | | | |
| | | | | mtr-miR399b | TGCCAAAGGA | 21 | 0.81 | 2224 |
| | | | | | GAGCTGCCCT | | | |
| | | | | | G/1414 | | | |
| | | | | mtr-miR399j | CGCCAAAGAA | 21 | 0.81 | 2225 |
| | | | | | GATTTGCCCC | | | |
| | | | | | G/1415 | | | |
| | | | | mtr-miR399o | TGCCAAAGGA | 21 | 0.81 | 2226 |
| | | | | | GAGCTGCCCT | | | |
| | | | | | G/1416 | | | |
| | | | | osa-miR399i | TGCCAAAGGA | 21 | 0.81 | 2227 |
| | | | | | GAGCTGCCCT | | | |
| | | | | | G/1417 | | | |
| | | | | osa-miR399j | TGCCAAAGGA | 21 | 0.81 | 2228 |
| | | | | | GAGTTGCCCT | | | |
| | | | | | A/1418 | | | |
| | | | | ptc-miR399h | TGCCAAAGGA | 21 | 0.81 | 2229 |
| | | | | | GAGTTTCCCT | | | |
| | | | | | G/1419 | | | |
| | | | | ptc-miR399i | TGCCAAAGGA | 21 | 0.81 | 2230 |
| | | | | | GAGTTGCCCT | | | |
| | | | | | A/1420 | | | |
| | | | | ptc-miR399k | TGCCAAAGGA | 21 | 0.81 | 2231 |
| | | | | | GATTTGCTCA | | | |
| | | | | | C/1421 | | | |
| | | | | rco-miR399d | TGCCAAAGGA | 21 | 0.81 | 2232 |
| | | | | | GAGCTGCCCT | | | |
| | | | | | G/1422 | | | |
| | | | | rco-miR399f | TGCCAAAGGA | 21 | 0.81 | 2233 |
| | | | | | GATTTGCTCA | | | |
| | | | | | C/1423 | | | |
| | | | | sbi-miR399b | TGCCAAAGGA | 21 | 0.81 | 2234 |
| | | | | | GAGCTGCCCT | | | |
| | | | | | G/1424 | | | |
| | | | | sly-miR399 | TGCCAAAGGA | 21 | 0.81 | 2235 |
| | | | | | GAGTTGCCCT | | | |
| | | | | | A/1425 | | | |
| | | | | tae-miR399 | TGCCAAAGGA | 19 | 0.81 | 2236 |
| | | | | | GAATTGCCC/ | | | |
| | | | | | 1426 | | | |
| | | | | tcc-miR399a | CGCCAAAGGA | 21 | 0.81 | 2237 |
| | | | | | GAGTTGCCCT | | | |
| | | | | | G/1427 | | | |
| | | | | tcc-miR399e | CGCCAAAGGA | 21 | 0.81 | 2238 |
| | | | | | GAATTGCCCT | | | |
| | | | | | G/1428 | | | |
| | | | | vvi-miR399f | TGCCGAAGGA | 21 | 0.81 | 2239 |
| | | | | | GATTTGTCCT | | | |
| | | | | | G/1429 | | | |
| | | | | vvi-miR399i | CGCCAAAGGA | 21 | 0.81 | 2240 |
| | | | | | GAGTTGCCCT | | | |
| | | | | | G/1430 | | | |
| | | | | zma-miR399d | TGCCAAAGGA | 21 | 0.81 | 2241 |
| | | | | | GAGCTGCCCT | | | |
| | | | | | G/1431 | | | |
| | | | | ghr-miR399c | TGCCAAAGGA | 21 | 0.76 | 2242 |
| | | | | | GAGTTGGCCT | | | |
| | | | | | T/1432 | | | |
| | | | | mtr-miR399d | TGCCAAAGGA | 21 | 0.76 | 2243 |
| | | | | | GAGCTGCCCT | | | |
| | | | | | A/1433 | | | |
| | | | | mtr-miR399m | TGCCAAAGGA | 21 | 0.76 | 2244 |
| | | | | | GAGCTGCCCT | | | |
| | | | | | A/1434 | | | |
| | | | | mtr-miR399n | TGCCAAAGGA | 21 | 0.76 | 2245 |
| | | | | | GAGCTGCCCT | | | |
| | | | | | A/1435 | | | |
| | | | | ptc-miR399l | CGCCAAAGGA | 21 | 0.76 | 2246 |
| | | | | | GAGTTGCCCT | | | |
| | | | | | C/1436 | | | |
| | | | | zma-miR399b | TGCCAAAGGA | 21 | 0.76 | 2247 |
| | | | | | GAGCTGTCCT | | | |
| | | | | | G/1437 | | | |
| | | | | mtr-miR399q | TGCCAAAGGA | 21 | 0.71 | 2248 |
| | | | | | GAGCTGCTCT | | | |
| | | | | | T/1438 | | | |
| Predicted | TGGAA | 21 | | bdi-miR528 | TGGAAGGGGC | 21 | 0.9 | 2249 |
| zma | GGGCC | | | | ATGCAGAGGA | | | |
| mir | ATGCC | | | | G/1439 | | | |
| 49816 | GAGGA | | | osa-miR528 | TGGAAGGGGC | 21 | 0.9 | 2250 |
| | G/105 | | | | ATGCAGAGGA | | | |
| | | | | | G/1440 | | | |
| | | | | sbi-miR528 | TGGAAGGGGC | 21 | 0.9 | 2251 |
| | | | | | ATGCAGAGGA | | | |
| | | | | | G/1441 | | | |
| | | | | ssp-miR528 | TGGAAGGGGC | 21 | 0.9 | 2252 |
| | | | | | ATGCAGAGGA | | | |
| | | | | | G/1442 | | | |
| | | | | zma-miR528a | TGGAAGGGGC | 21 | 0.9 | 2253 |
| | | | | | ATGCAGAGGA | | | |
| | | | | | G/1443 | | | |
| | | | | zma-miR528b | TGGAAGGGGC | 21 | 0.9 | 2254 |
| | | | | | ATGCAGAGGA | | | |
| | | | | | G/1444 | | | |
| aqc- | AGAAG | 21 | 260 | ppt-miR529d | AGAAGAGAG | 21 | 0.95 | 2255 |
| miR529 | AGAGA | | | | AGAGCACAGC | | | |
| | GAGCA | | | | CC/1445 | | | |
| | CAACC | | | ppt-miR529a | CGAAGAGAGA | 21 | 0.9 | 2256 |
| | C/58 | | | | GAGCACAGCC | | | |
| | | | | | C/1446 | | | |
| | | | | ppt-miR529b | CGAAGAGAGA | 21 | 0.9 | 2257 |
| | | | | | GAGCACAGCC | | | |
| | | | | | C/1447 | | | |
| | | | | ppt-miR529c | CGAAGAGAGA | 21 | 0.9 | 2258 |
| | | | | | GAGCACAGCC | | | |
| | | | | | C/1448 | | | |
| | | | | ppt-miR529e | AGAAGAGAG | 21 | 0.9 | 2259 |
| | | | | | AGAGTACAGC | | | |
| | | | | | CC/1449 | | | |
| | | | | ppt-miR529f | AGAAGAGAG | 21 | 0.9 | 2260 |
| | | | | | AGAGTACAGC | | | |
| | | | | | CC/1450 | | | |
| | | | | bdi-miR529 | AGAAGAGAG | 21 | 0.86 | 2261 |
| | | | | | AGAGTACAGC | | | |
| | | | | | CT/1451 | | | |
| | | | | far-miR529 | AGAAGAGAG | 21 | 0.86 | 2262 |
| | | | | | AGAGCACAGC | | | |
| | | | | | TT/1452 | | | |
| | | | | ppt-miR529g | CGAAGAGAGA | 21 | 0.86 | 2263 |
| | | | | | GAGCACAGTC | | | |
| | | | | | C/1453 | | | |
| | | | | zma-miR529 | AGAAGAGAG | 21 | 0.86 | 2264 |
| | | | | | AGAGTACAGC | | | |
| | | | | | CT/1454 | | | |
| | | | | osa-miR529b | AGAAGAGAG | 21 | 0.81 | 2265 |
| | | | | | AGAGTACAGC | | | |
| | | | | | TT/1455 | | | |

Table 6: Provided are homologues/orthologs of the miRNAs described in Table 2 above along with the sequence identifiers and the degree of sequence identity.

TABLE 7
Summary of Homologs/Orthologs of miRs 395, 397 and 398

| | | | Stem- | | | | | Hom. |
|---|---|---|---|---|---|---|---|---|
| | | | loop | | | | | Stem- |
| | | | sequence/ | | | | | loop |
| Small | Mature | | SEQ | | | | | SEQ |
| RNA | SEQ ID | Mir | ID | | Hom. SEQ ID | Homo. | | ID |
| Name | NO: | length | NO: | Hom. Name | NO: | length | Identity | NO: |
| mtr- | ATGAAG | 21 | 263 | | | | | |
| miR395c | TGTTTGG | | | | | | | |
| | GGGAAC | | | | | | | |
| | TC/62 | | | | | | | |
| osa- | GTGAAG | 21 | 264 | | | | | |
| miR395m | TGTTTGG | | | | | | | |
| | GGGAAC | | | | | | | |
| | TC/63 | | | | | | | |
| zma | TCATTGA | 21 | 268, | | | | | |
| miR397a | GCGCAG | | 269 | | | | | |
| | CGTTGAT | | | | | | | |
| | G/116 | | | | | | | |
| zma- | GGGGCG | 21 | 270 | | | | | |
| miR398b* | GACTGG | | | | | | | |
| | GAACAC | | | | | | | |
| | ATG/117 | | | | | | | |
| zma- | GGGGCG | 21 | 270 | zma- | 1027 | 21 | 0.9 | 1837 |
| miR398b* | GACTGG | | | miR398a* | | | | |
| | GAACAC | | | aly- | 1028 | 21 | 0.71 | 1838 |
| | ATG/117 | | | miR398c* | | | | |
| | | | | bdi- | 1029 | 22 | 0.71 | 1839 |
| | | | | miR398b | | | | |
| | | | | aly- | 1030 | 21 | 0.67 | 1840 |
| | | | | miR398b* | | | | |
| | | | | aly- | 1031 | 21 | 0.62 | 1841 |
| | | | | miR398a* | | | | |
| osa- | GTGAAG | 21 | 264 | zma- | 1828; | 21 | 1.00/ | 2644 |
| miR395m | TGTTTGG | | | miR395e | 1456 | | 0.95 | |
| | GGGAAC | | | zma- | 1829; | 21/20 | 1.00/ | 2645 |
| | TC/63 | | | miR395d | 1457 | | 0.90 | |
| | | | | zma- | 1830; | 21 | 1.00/ | 2646 |
| | | | | miR395f | 1458 | | 0.90 | |
| | | | | osa- | 1459 | 21 | 1 | 2269 |
| | | | | miR395b | | | | |
| | | | | osa- | 1460 | 21 | 1 | 2270 |
| | | | | miR395d | | | | |
| | | | | osa- | 1461 | 21 | 1 | 2271 |
| | | | | miR395e | | | | |
| | | | | osa- | 1462 | 21 | 1 | 2272 |
| | | | | miR395g | | | | |
| | | | | osa- | 1463 | 21 | 1 | 2273 |
| | | | | miR395h | | | | |
| | | | | osa- | 1464 | 21 | 1 | 2274 |
| | | | | miR395i | | | | |
| | | | | osa- | 1465 | 21 | 1 | 2275 |
| | | | | miR395j | | | | |
| | | | | osa- | 1466 | 21 | 1 | 2276 |
| | | | | miR395k | | | | |
| | | | | osa- | 1467 | 21 | 1 | 2277 |
| | | | | miR395l | | | | |
| | | | | osa- | 1468 | 21 | 1 | 2278 |
| | | | | miR395n | | | | |
| | | | | osa- | 1469 | 21 | 1 | 2279 |
| | | | | miR395p | | | | |
| | | | | osa- | 1470 | 21 | 1 | 2280 |
| | | | | miR395q | | | | |
| | | | | osa- | 1471 | 21 | 1 | 2281 |
| | | | | miR395r | | | | |
| | | | | osa- | 1472 | 21 | 1 | 2282 |
| | | | | miR395s | | | | |
| | | | | osa- | 1473 | 21 | 1 | 2283 |
| | | | | miR395y | | | | |
| | | | | sbi- | 1474 | 21 | 1 | 2284 |
| | | | | miR395a | | | | |
| | | | | sbi- | 1475 | 21 | 1 | 2285 |
| | | | | miR395b | | | | |
| | | | | sbi- | 1476 | 21 | 1 | 2647 |
| | | | | miR395c | | | | |
| | | | | sbi- | 1477 | 21 | 1 | 2648 |
| | | | | miR395d | | | | |
| | | | | sbi- | 1478 | 21 | 1 | 2288 |
| | | | | miR395e | | | | |
| | | | | sbi- | 1479 | 21 | 1 | 2289 |
| | | | | miR395g | | | | |
| | | | | sbi- | 1480 | 21 | 1 | 2290 |
| | | | | miR395h | | | | |
| | | | | sbi- | 1481 | 21 | 1 | 2291 |
| | | | | miR395i | | | | |
| | | | | sbi- | 1482 | 21 | 1 | 2292 |
| | | | | miR395j | | | | |
| | | | | tae- | 1483 | 21 | 1 | 2293 |
| | | | | miR395a | | | | |
| | | | | zma- | 1484 | 21 | 1 | 2294 |
| | | | | miR395a | | | | |
| | | | | zma- | 1485 | 21 | 1 | 2295 |
| | | | | miR395b | | | | |
| | | | | zma- | 1486 | 21 | 1 | 2296 |
| | | | | miR395g | | | | |
| | | | | zma- | 1487 | 21 | 1 | 2297 |
| | | | | miR395h | | | | |
| | | | | zma- | 1488 | 21 | 1 | 2298 |
| | | | | miR395i | | | | |
| | | | | zma- | 1489 | 21 | 1 | 2299 |
| | | | | miR395j | | | | |
| | | | | zma- | 1490 | 21 | 1 | 2300 |
| | | | | miR395n | | | | |
| | | | | zma- | 1491 | 21 | 1 | 2301 |
| | | | | miR395p | | | | |
| | | | | aly- | 1492 | 21 | 0.95 | 2302 |
| | | | | miR395d | | | | |
| | | | | aly- | 1493 | 21 | 0.95 | 2303 |
| | | | | miR395e | | | | |
| | | | | aly- | 1494 | 21 | 0.95 | 2304 |
| | | | | miR395g | | | | |
| | | | | ath- | 1495 | 21 | 0.95 | 2305 |
| | | | | miR395a | | | | |
| | | | | ath- | 1496 | 21 | 0.95 | 2306 |
| | | | | miR395d | | | | |
| | | | | ath- | 1497 | 21 | 0.95 | 2307 |
| | | | | miR395e | | | | |
| | | | | bdi- | 1498 | 20 | 0.95 | 2308 |
| | | | | miR395a | | | | |
| | | | | bdi- | 1499 | 20 | 0.95 | 2309 |
| | | | | miR395b | | | | |
| | | | | bdi- | 1500 | 20 | 0.95 | 2310 |
| | | | | miR395c | | | | |
| | | | | bdi- | 1501 | 20 | 0.95 | 2311 |
| | | | | miR395e | | | | |
| | | | | bdi- | 1502 | 20 | 0.95 | 2312 |
| | | | | miR395f | | | | |
| | | | | bdi- | 1503 | 20 | 0.95 | 2313 |
| | | | | miR395g | | | | |
| | | | | bdi- | 1504 | 20 | 0.95 | 2314 |
| | | | | miR395h | | | | |
| | | | | bdi- | 1505 | 20 | 0.95 | 2315 |
| | | | | miR395i | | | | |
| | | | | bdi- | 1506 | 20 | 0.95 | 2316 |
| | | | | miR395j | | | | |
| | | | | bdi- | 1507 | 20 | 0.95 | 2317 |
| | | | | miR395k | | | | |
| | | | | bdi- | 1508 | 20 | 0.95 | 2318 |
| | | | | miR395l | | | | |
| | | | | bdi | 1509 | 20 | 0.95 | 2319 |
| | | | | miR395m | | | | |
| | | | | bdi- | 1510 | 20 | 0.95 | 2320 |
| | | | | miR395n | | | | |
| | | | | csi- | 1511 | 21 | 0.95 | 2321 |
| | | | | miR395 | | | | |
| | | | | ghr- | 1512 | 21 | 0.95 | 2322 |
| | | | | miR395d | | | | |
| | | | | gma- | 1513 | 21 | 0.95 | 2323 |
| | | | | miR395 | | | | |
| | | | | mtr- | 1514 | 21 | 0.95 | 2324 |
| | | | | miR395a | | | | |
| | | | | mtr- | 1515 | 21 | 0.95 | 2325 |
| | | | | miR395c | | | | |
| | | | | mtr- | 1516 | 21 | 0.95 | 2326 |
| | | | | miR395d | | | | |
| | | | | mtr- | 1517 | 21 | 0.95 | 2327 |
| | | | | miR395e | | | | |
| | | | | mtr- | 1518 | 21 | 0.95 | 2328 |
| | | | | miR395f | | | | |
| | | | | mtr- | 1519 | 21 | 0.95 | 2329 |
| | | | | miR395g | | | | |
| | | | | mtr- | 1520 | 21 | 0.95 | 2330 |
| | | | | miR395i | | | | |
| | | | | mtr- | 1521 | 21 | 0.95 | 2331 |
| | | | | miR395j | | | | |
| | | | | mtr- | 1522 | 21 | 0.95 | 2332 |
| | | | | miR395k | | | | |
| | | | | mtr- | 1523 | 21 | 0.95 | 2333 |
| | | | | miR395l | | | | |
| | | | | mtr- | 1524 | 21 | 0.95 | 2334 |
| | | | | miR395m | | | | |
| | | | | mtr- | 1525 | 21 | 0.95 | 2335 |
| | | | | miR395n | | | | |
| | | | | mtr- | 1526 | 21 | 0.95 | 2336 |
| | | | | miR395o | | | | |
| | | | | mtr- | 1527 | 21 | 0.95 | 2337 |
| | | | | miR395q | | | | |
| | | | | mtr- | 1528 | 21 | 0.95 | 2338 |
| | | | | miR395r | | | | |
| | | | | osa- | 1529 | 21 | 0.95 | 2339 |
| | | | | miR395a | | | | |
| | | | | osa- | 1530 | 21 | 0.95 | 2340 |
| | | | | miR395c | | | | |
| | | | | osa- | 1531 | 21 | 0.95 | 2341 |
| | | | | miR395f | | | | |
| | | | | osa- | 1532 | 21 | 0.95 | 2342 |
| | | | | miR395t | | | | |
| | | | | ptc- | 1533 | 21 | 0.95 | 2343 |
| | | | | miR395b | | | | |
| | | | | ptc- | 1534 | 21 | 0.95 | 2344 |
| | | | | miR395c | | | | |
| | | | | ptc- | 1535 | 21 | 0.95 | 2345 |
| | | | | miR395d | | | | |
| | | | | ptc- | 1536 | 21 | 0.95 | 2346 |
| | | | | miR395e | | | | |
| | | | | ptc- | 1537 | 21 | 0.95 | 2347 |
| | | | | miR395f | | | | |
| | | | | ptc- | 1538 | 21 | 0.95 | 2348 |
| | | | | miR395g | | | | |
| | | | | ptc- | 1539 | 21 | 0.95 | 2349 |
| | | | | miR395h | | | | |
| | | | | ptc- | 1540 | 21 | 0.95 | 2350 |
| | | | | miR395i | | | | |
| | | | | ptc- | 1541 | 21 | 0.95 | 2351 |
| | | | | miR395j | | | | |
| | | | | rco- | 1542 | 21 | 0.95 | 2352 |
| | | | | miR395a | | | | |
| | | | | rco- | 1543 | 21 | 0.95 | 2353 |
| | | | | miR395b | | | | |
| | | | | rco- | 1544 | 21 | 0.95 | 2354 |
| | | | | miR395c | | | | |
| | | | | rco- | 1545 | 21 | 0.95 | 2355 |
| | | | | miR395d | | | | |
| | | | | rco- | 1546 | 21 | 0.95 | 2356 |
| | | | | miR395e | | | | |
| | | | | sbi- | 1547 | 21 | 0.95 | 2357 |
| | | | | miR395f | | | | |
| | | | | sbi- | 1548 | 21 | 0.95 | 2358 |
| | | | | miR395k | | | | |
| | | | | sbi- | 1549 | 21 | 0.95 | 2359 |
| | | | | miR395l | | | | |
| | | | | sde- | 1550 | 21 | 0.95 | 2360 |
| | | | | miR395 | | | | |
| | | | | sly- | 1551 | 22 | 0.95 | 2361 |
| | | | | miR395a | | | | |
| | | | | sly- | 1552 | 22 | 0.95 | 2362 |
| | | | | miR395b | | | | |
| | | | | tae- | 1553 | 20 | 0.95 | 2363 |
| | | | | miR395b | | | | |
| | | | | tcc- | 1554 | 21 | 0.95 | 2364 |
| | | | | miR395a | | | | |
| | | | | tcc- | 1555 | 21 | 0.95 | 2365 |
| | | | | miR395b | | | | |
| | | | | vvi- | 1556 | 21 | 0.95 | 2366 |
| | | | | miR395a | | | | |
| | | | | vvi- | 1557 | 21 | 0.95 | 2367 |
| | | | | miR395b | | | | |
| | | | | vvi- | 1558 | 21 | 0.95 | 2368 |
| | | | | miR395c | | | | |
| | | | | vvi- | 1559 | 21 | 0.95 | 2369 |
| | | | | miR395d | | | | |
| | | | | vvi- | 1560 | 21 | 0.95 | 2370 |
| | | | | miR395e | | | | |
| | | | | vvi- | 1561 | 21 | 0.95 | 2371 |
| | | | | miR395f | | | | |
| | | | | vvi- | 1562 | 21 | 0.95 | 2372 |
| | | | | miR395g | | | | |
| | | | | vvi- | 1563 | 21 | 0.95 | 2373 |
| | | | | miR395h | | | | |
| | | | | vvi- | 1564 | 21 | 0.95 | 2374 |
| | | | | miR395i | | | | |
| | | | | vvi- | 1565 | 21 | 0.95 | 2375 |
| | | | | miR395j | | | | |
| | | | | vvi- | 1566 | 21 | 0.95 | 2376 |
| | | | | miR395k | | | | |
| | | | | vvi- | 1567 | 21 | 0.95 | 2377 |
| | | | | miR395l | | | | |
| | | | | vvi- | 1568 | 21 | 0.95 | 2378 |
| | | | | miR395m | | | | |
| | | | | zma- | 1569 | 21 | 0.95 | 2379 |
| | | | | miR395c | | | | |
| | | | | zma- | 1570 | 21 | 0.95 | 2380 |
| | | | | miR395l | | | | |
| | | | | zma- | 1571 | 21 | 0.95 | 2381 |
| | | | | miR395m | | | | |
| | | | | zma- | 1572 | 21 | 0.95 | 2382 |
| | | | | miR395o | | | | |
| | | | | aly- | 1573 | 21 | 0.9 | 2383 |
| | | | | miR395b | | | | |
| | | | | aly- | 1574 | 21 | 0.9 | 2384 |
| | | | | miR395f | | | | |
| | | | | aly- | 1575 | 21 | 0.9 | 2385 |
| | | | | miR395h | | | | |
| | | | | aly- | 1576 | 21 | 0.9 | 2386 |
| | | | | miR395i | | | | |
| | | | | ath- | 1577 | 21 | 0.9 | 2387 |
| | | | | miR395b | | | | |
| | | | | ath- | 1578 | 21 | 0.9 | 2388 |
| | | | | miR395c | | | | |
| | | | | ath- | 1579 | 21 | 0.9 | 2389 |
| | | | | miR395f | | | | |
| | | | | ghr- | 1580 | 21 | 0.9 | 2390 |
| | | | | miR395a | | | | |
| | | | | mtr- | 1581 | 21 | 0.9 | 2391 |
| | | | | miR395b | | | | |
| | | | | mtr- | 1582 | 21 | 0.9 | 2392 |
| | | | | miR395h | | | | |
| | | | | mtr- | 1583 | 21 | 0.9 | 2393 |
| | | | | miR395p | | | | |
| | | | | osa- | 1584 | 20 | 0.9 | 2394 |
| | | | | miR395a.2 | | | | |
| | | | | osa- | 1585 | 21 | 0.9 | 2395 |
| | | | | miR395o | | | | |
| | | | | osa- | 1586 | 21 | 0.9 | 2396 |
| | | | | miR395u | | | | |
| | | | | osa- | 1587 | 21 | 0.9 | 2397 |
| | | | | miR395v | | | | |
| | | | | zma- | 1588 | 21 | 0.9 | 2398 |
| | | | | miR395k | | | | |
| | | | | aly- | 1589 | 21 | 0.86 | 2399 |
| | | | | miR395c | | | | |
| | | | | aqc- | 1590 | 21 | 0.86 | 2400 |
| | | | | miR395a | | | | |
| | | | | aqc- | 1591 | 21 | 0.86 | 2401 |
| | | | | miR395b | | | | |
| | | | | ghr- | 1592 | 21 | 0.86 | 2402 |
| | | | | miR395c | | | | |
| | | | | osa- | 1593 | 21 | 0.86 | 2403 |
| | | | | miR395x | | | | |
| | | | | pab- | 1594 | 21 | 0.86 | 2404 |
| | | | | miR395 | | | | |
| | | | | ptc- | 1595 | 21 | 0.86 | 2405 |
| | | | | miR395a | | | | |
| | | | | bdi- | 1596 | 21 | 0.81 | 2406 |
| | | | | miR395d | | | | |
| | | | | osa- | 1597 | 22 | 0.81 | 2407 |
| | | | | miR395w | | | | |
| | | | | vvi- | 1598 | 21 | 0.81 | 2408 |
| | | | | miR395n | | | | |
| | | | | ppt- | 1599 | 20 | 0.76 | 2409 |
| | | | | miR395 | | | | |
| Predicted | TGTGTTC | 21 | | zma- | 1831 | 21 | 1.00/ | 2649; |
| zma | TCAGGT | | | miR398a | | | 0.95 | 2410 |
| mir | CGCCCC | | | sbi- | 1601 | 21 | 1 | 2411 |
| 50266 | CG/110 | | | miR398 | | | | |
| | | | | tae- | 1602 | 21 | 1 | 2412 |
| | | | | miR398 | | | | |
| | | | | zma- | 1603 | 21 | 1 | 2650 |
| | | | | miR398b | | | | |
| | | | | zma- | 1604 | 21 | 1 | 2414 |
| | | | | miR398c | | | | |
| | | | | aqc- | 1605 | 21 | 0.95 | 2415 |
| | | | | miR398b | | | | |
| | | | | bdi- | 1606 | 21 | 0.95 | 2416 |
| | | | | miR398a | | | | |
| | | | | bdi- | 1607 | 21 | 0.95 | 2417 |
| | | | | miR398c | | | | |
| | | | | mtr- | 1608 | 21 | 0.95 | 2418 |
| | | | | miR398b | | | | |
| | | | | mtr- | 1609 | 21 | 0.95 | 2419 |
| | | | | miR398c | | | | |
| | | | | osa- | 1610 | 21 | 0.95 | 2420 |
| | | | | miR398b | | | | |
| | | | | ptc- | 1611 | 21 | 0.95 | 2421 |
| | | | | miR398b | | | | |
| | | | | ptc- | 1612 | 21 | 0.95 | 2422 |
| | | | | miR398c | | | | |
| | | | | rco- | 1613 | 21 | 0.95 | 2423 |
| | | | | miR398b | | | | |
| | | | | tcc- | 1614 | 21 | 0.95 | 2424 |
| | | | | miR398a | | | | |
| | | | | vvi- | 1615 | 21 | 0.95 | 2425 |
| | | | | miR398b | | | | |
| | | | | vvi- | 1616 | 21 | 0.95 | 2426 |
| | | | | miR398c | | | | |
| | | | | mtr- | 1832 | 21 | 0.86/ | 2651 |
| | | | | miR398a | | | 0.95 | |
| | | | | aly- | 1618 | 21 | 0.9 | 2428 |
| | | | | miR398b | | | | |
| | | | | aly- | 1619 | 23 | 0.9 | 2429 |
| | | | | miR398c | | | | |
| | | | | ath- | 1620 | 21 | 0.9 | 2430 |
| | | | | miR398b | | | | |
| | | | | ath- | 1621 | 21 | 0.9 | 2431 |
| | | | | miR398c | | | | |
| | | | | ahy- | 1622 | 20 | 0.86 | 2432 |
| | | | | miR398 | | | | |
| | | | | aly- | 1623 | 21 | 0.86 | 2433 |
| | | | | miR398a | | | | |
| | | | | aqc | 1624 | 21 | 0.86 | 2434 |
| | | | | miR398a | | | | |
| | | | | ath- | 1625 | 21 | 0.86 | 2435 |
| | | | | miR398a | | | | |
| | | | | bol | 1626 | 21 | 0.86 | 2436 |
| | | | | miR398a | | | | |
| | | | | csi- | 1627 | 21 | 0.86 | 2437 |
| | | | | miR398 | | | | |
| | | | | ghr- | 1628 | 21 | 0.86 | 2652 |
| | | | | miR398 | | | | |
| | | | | gma- | 1629 | 21 | 0.86 | 2439 |
| | | | | miR398a | | | | |
| | | | | gma- | 1630 | 21 | 0.86 | 2440 |
| | | | | miR398b | | | | |
| | | | | gra- | 1631 | 21 | 0.86 | 2441 |
| | | | | miR398 | | | | |
| | | | | osa- | 1632 | 21 | 0.86 | 2442 |
| | | | | miR398a | | | | |
| | | | | ptc- | 1633 | 21 | 0.86 | 2443 |
| | | | | miR398a | | | | |
| | | | | rco- | 1634 | 21 | 0.86 | 2444 |
| | | | | miR398a | | | | |
| | | | | tcc- | 1635 | 21 | 0.86 | 2445 |
| | | | | miR398b | | | | |
| | | | | vvi- | 1636 | 21 | 0.86 | 2446 |
| | | | | miR398a | | | | |
| | | | | pta- | 1637 | 21 | 0.81 | 2447 |
| | | | | miR398 | | | | |
| zma- | TCATTGA | 21 | 269 | zma- | 1638 | 21 | 1 | 2653 |
| miR397a | GCGCAG | | | miR397b | | | | |
| | CGTTGAT | | | aly- | 1639 | 21 | 0.95 | 2449 |
| | G/116 | | | miR397a | | | | |
| | | | | aly- | 1640 | 21 | 0.95 | 2450 |
| | | | | miR397b | | | | |
| | | | | ath- | 1641 | 21 | 0.95 | 2451 |
| | | | | miR397a | | | | |
| | | | | bdi | 1642 | 21 | 0.95 | 2452 |
| | | | | miR397 | | | | |
| | | | | bdi | 1643 | 21 | 0.95 | 2453 |
| | | | | miR397a | | | | |
| | | | | bna- | 1644 | 22 | 0.95 | 2454 |
| | | | | miR397a | | | | |
| | | | | bna- | 1645 | 22 | 0.95 | 2455 |
| | | | | miR397b | | | | |
| | | | | csi- | 1646 | 21 | 0.95 | 2456 |
| | | | | miR397 | | | | |
| | | | | osa- | 1647 | 21 | 0.95 | 2457 |
| | | | | miR397a | | | | |
| | | | | ptc- | 1648 | 21 | 0.95 | 2458 |
| | | | | miR397a | | | | |
| | | | | rco- | 1649 | 21 | 0.95 | 2459 |
| | | | | miR397 | | | | |
| | | | | sbi- | 1650 | 21 | 0.95 | 2460 |
| | | | | miR397 | | | | |
| | | | | tcc- | 1651 | 21 | 0.95 | 2461 |
| | | | | miR397 | | | | |
| | | | | vvi- | 1652 | 21 | 0.95 | 2462 |
| | | | | miR397a | | | | |
| | | | | vvi- | 1653 | 21 | 0.95 | 2463 |
| | | | | miR397b | | | | |
| | | | | ath- | 1654 | 21 | 0.9 | 2464 |
| | | | | miR397b | | | | |
| | | | | osa- | 1655 | 21 | 0.9 | 2465 |
| | | | | miR397b | | | | |
| | | | | pab- | 1656 | 21 | 0.9 | 2466 |
| | | | | miR397 | | | | |
| | | | | ptc- | 1657 | 21 | 0.9 | 2467 |
| | | | | miR397b | | | | |
| | | | | sly- | 1833 | 20 | 0.86/ | 2468 |
| | | | | miR397 | | | 0.81 | |
| | | | | bdi- | 1659 | 21 | 0.86 | 2469 |
| | | | | miR397b | | | | |
| | | | | ghr- | 1660 | 22 | 0.86 | 2470 |
| | | | | miR397a | | | | |
| | | | | hvu- | 1661 | 21 | 0.86 | 2471 |
| | | | | miR397 | | | | |
| | | | | ptc- | 1662 | 21 | 0.86 | 2472 |
| | | | | miR397c | | | | |
| | | | | osa- | 1663 | 21 | 0.81 | 2473 |
| | | | | miR397a.2 | | | | |
| | | | | osa- | 1664 | 21 | 0.81 | 2474 |
| | | | | miR397b.2 | | | | |
| | | | | ghr- | 1665 | 21 | 0.76 | 2475 |
| | | | | miR397b | | | | |
| mtr- | ATGAAG | 21 | 263 | gma- | 1666 | 21 | 1 | 2476 |
| miR395c | TGTTTGG | | | miR395 | | | | |
| | GGGAAC | | | mtr- | 1667 | 21 | 1 | 2477 |
| | TC/62 | | | miR395a | | | | |
| | | | | mtr- | 1668 | 21 | 1 | 2478 |
| | | | | miR395d | | | | |
| | | | | mtr- | 1669 | 21 | 1 | 2479 |
| | | | | miR395e | | | | |
| | | | | mtr- | 1670 | 21 | 1 | 2480 |
| | | | | miR395f | | | | |
| | | | | mtr- | 1671 | 21 | 1 | 2481 |
| | | | | miR395i | | | | |
| | | | | mtr- | 1672 | 21 | 1 | 2482 |
| | | | | miR395j | | | | |
| | | | | mtr- | 1673 | 21 | 1 | 2483 |
| | | | | miR395k | | | | |
| | | | | mtr- | 1674 | 21 | 1 | 2484 |
| | | | | miR395l | | | | |
| | | | | mtr- | 1675 | 21 | 1 | 2485 |
| | | | | miR395m | | | | |
| | | | | mtr- | 1676 | 21 | 1 | 2486 |
| | | | | miR395n | | | | |
| | | | | mtr- | 1677 | 21 | 1 | 2487 |
| | | | | miR395o | | | | |
| | | | | mtr- | 1678 | 21 | 1 | 2488 |
| | | | | miR395q | | | | |
| | | | | mtr- | 1679 | 21 | 1 | 2489 |
| | | | | miR395r | | | | |
| | | | | sbi- | 1680 | 21 | 1 | 2490 |
| | | | | miR395f | | | | |
| | | | | zma- | 1834 | 21 | 0.95/ | 2654; |
| | | | | miR395e | | | 0.90 | 2491 |
| | | | | zma- | 1835 | 21/20 | 0.95/ | 2655; |
| | | | | miR395d | | | 0.86 | 2492 |
| | | | | zma- | 1836 | 21 | 0.95/ | 2656; |
| | | | | miR395f | | | 0.86 | 2493 |
| | | | | aly- | 1684 | 21 | 0.95 | 2494 |
| | | | | miR395d | | | | |
| | | | | aly- | 1685 | 21 | 0.95 | 2495 |
| | | | | miR395e | | | | |
| | | | | aly- | 1686 | 21 | 0.95 | 2496 |
| | | | | miR395g | | | | |
| | | | | ath- | 1687 | 21 | 0.95 | 2497 |
| | | | | miR395a | | | | |
| | | | | ath- | 1688 | 21 | 0.95 | 2498 |
| | | | | miR395d | | | | |
| | | | | ath- | 1689 | 21 | 0.95 | 2499 |
| | | | | miR395e | | | | |
| | | | | bdi- | 1690 | 20 | 0.95 | 2500 |
| | | | | miR395a | | | | |
| | | | | bdi- | 1691 | 20 | 0.95 | 2501 |
| | | | | miR395b | | | | |
| | | | | bdi- | 1692 | 20 | 0.95 | 2502 |
| | | | | miR395c | | | | |
| | | | | bdi- | 1693 | 20 | 0.95 | 2503 |
| | | | | miR395e | | | | |
| | | | | bdi- | 1694 | 20 | 0.95 | 2504 |
| | | | | miR395f | | | | |
| | | | | bdi- | 1695 | 20 | 0.95 | 2505 |
| | | | | miR395g | | | | |
| | | | | bdi- | 1696 | 20 | 0.95 | 2506 |
| | | | | miR395h | | | | |
| | | | | bdi- | 1697 | 20 | 0.95 | 2507 |
| | | | | miR395i | | | | |
| | | | | bdi- | 1698 | 20 | 0.95 | 2508 |
| | | | | miR395j | | | | |
| | | | | bdi- | 1699 | 20 | 0.95 | 2509 |
| | | | | miR395k | | | | |
| | | | | bdi- | 1700 | 20 | 0.95 | 2510 |
| | | | | miR395l | | | | |
| | | | | bdi- | 1701 | 20 | 0.95 | 2511 |
| | | | | miR395m | | | | |
| | | | | bdi- | 1702 | 20 | 0.95 | 2512 |
| | | | | miR395n | | | | |
| | | | | csi- | 1703 | 21 | 0.95 | 2513 |
| | | | | miR395 | | | | |
| | | | | ghr- | 1704 | 21 | 0.95 | 2514 |
| | | | | miR395d | | | | |
| | | | | mtr- | 1705 | 21 | 0.95 | 2515 |
| | | | | miR395b | | | | |
| | | | | mtr- | 1706 | 21 | 0.95 | 2516 |
| | | | | miR395g | | | | |
| | | | | mtr- | 1707 | 21 | 0.95 | 2517 |
| | | | | miR395h | | | | |
| | | | | osa- | 1708 | 21 | 0.95 | 2518 |
| | | | | miR395b | | | | |
| | | | | osa- | 1709 | 21 | 0.95 | 2519 |
| | | | | miR395d | | | | |
| | | | | osa- | 1710 | 21 | 0.95 | 2520 |
| | | | | miR395e | | | | |
| | | | | osa- | 1711 | 21 | 0.95 | 2521 |
| | | | | miR395g | | | | |
| | | | | osa- | 1712 | 21 | 0.95 | 2522 |
| | | | | miR395h | | | | |
| | | | | osa- | 1713 | 21 | 0.95 | 2523 |
| | | | | miR395i | | | | |
| | | | | osa- | 1714 | 21 | 0.95 | 2524 |
| | | | | miR395j | | | | |
| | | | | osa- | 1715 | 21 | 0.95 | 2525 |
| | | | | miR395k | | | | |
| | | | | osa- | 1716 | 21 | 0.95 | 2526 |
| | | | | miR395l | | | | |
| | | | | osa- | 1717 | 21 | 0.95 | 2527 |
| | | | | miR395m | | | | |
| | | | | osa- | 1718 | 21 | 0.95 | 2528 |
| | | | | miR395n | | | | |
| | | | | osa- | 1719 | 21 | 0.95 | 2529 |
| | | | | miR395o | | | | |
| | | | | osa- | 1720 | 21 | 0.95 | 2530 |
| | | | | miR395p | | | | |
| | | | | osa- | 1721 | 21 | 0.95 | 2531 |
| | | | | miR395q | | | | |
| | | | | osa- | 1722 | 21 | 0.95 | 2532 |
| | | | | miR395r | | | | |
| | | | | osa- | 1723 | 21 | 0.95 | 2533 |
| | | | | miR395s | | | | |
| | | | | osa- | 1724 | 21 | 0.95 | 2534 |
| | | | | miR395y | | | | |
| | | | | ptc- | 1725 | 21 | 0.95 | 2535 |
| | | | | miR395b | | | | |
| | | | | ptc- | 1726 | 21 | 0.95 | 2536 |
| | | | | miR395c | | | | |
| | | | | ptc- | 1727 | 21 | 0.95 | 2537 |
| | | | | miR395d | | | | |
| | | | | ptc- | 1728 | 21 | 0.95 | 2538 |
| | | | | miR395e | | | | |
| | | | | ptc- | 1729 | 21 | 0.95 | 2539 |
| | | | | miR395f | | | | |
| | | | | ptc- | 1730 | 21 | 0.95 | 2540 |
| | | | | miR395g | | | | |
| | | | | ptc- | 1731 | 21 | 0.95 | 2541 |
| | | | | miR395h | | | | |
| | | | | ptc- | 1732 | 21 | 0.95 | 2542 |
| | | | | miR395i | | | | |
| | | | | ptc- | 1733 | 21 | 0.95 | 2543 |
| | | | | miR395j | | | | |
| | | | | rco- | 1734 | 21 | 0.95 | 2544 |
| | | | | miR395a | | | | |
| | | | | rco- | 1735 | 21 | 0.95 | 2545 |
| | | | | miR395b | | | | |
| | | | | rco- | 1736 | 21 | 0.95 | 2546 |
| | | | | miR395c | | | | |
| | | | | rco- | 1737 | 21 | 0.95 | 2547 |
| | | | | miR395d | | | | |
| | | | | rco- | 1738 | 21 | 0.95 | 2548 |
| | | | | miR395e | | | | |
| | | | | sbi- | 1739 | 21 | 0.95 | 2549 |
| | | | | miR395a | | | | |
| | | | | sbi- | 1740 | 21 | 0.95 | 2550 |
| | | | | miR395b | | | | |
| | | | | sbi- | 1741 | 21 | 0.95 | 2657 |
| | | | | miR395c | | | | |
| | | | | sbi- | 1742 | 21 | 0.95 | 2658 |
| | | | | miR395d | | | | |
| | | | | sbi- | 1743 | 21 | 0.95 | 2553 |
| | | | | miR395e | | | | |
| | | | | sbi- | 1744 | 21 | 0.95 | 2554 |
| | | | | miR395g | | | | |
| | | | | sbi- | 1745 | 21 | 0.95 | 2555 |
| | | | | miR395h | | | | |
| | | | | sbi- | 1746 | 21 | 0.95 | 2556 |
| | | | | miR395i | | | | |
| | | | | sbi- | 1747 | 21 | 0.95 | 2557 |
| | | | | miR395j | | | | |
| | | | | sde- | 1748 | 21 | 0.95 | 2558 |
| | | | | miR395 | | | | |
| | | | | sly- | 1749 | 22 | 0.95 | 2559 |
| | | | | miR395a | | | | |
| | | | | sly- | 1750 | 22 | 0.95 | 2560 |
| | | | | miR395b | | | | |
| | | | | tae- | 1751 | 21 | 0.95 | 2561 |
| | | | | miR395a | | | | |
| | | | | tae- | 1752 | 20 | 0.95 | 2562 |
| | | | | miR395b | | | | |
| | | | | tcc- | 1753 | 21 | 0.95 | 2563 |
| | | | | miR395a | | | | |
| | | | | tcc- | 1754 | 21 | 0.95 | 2564 |
| | | | | miR395b | | | | |
| | | | | vvi- | 1755 | 21 | 0.95 | 2565 |
| | | | | miR395a | | | | |
| | | | | vvi- | 1756 | 21 | 0.95 | 2566 |
| | | | | miR395b | | | | |
| | | | | vvi- | 1757 | 21 | 0.95 | 2567 |
| | | | | miR395c | | | | |
| | | | | vvi- | 1758 | 21 | 0.95 | 2568 |
| | | | | miR395d | | | | |
| | | | | vvi- | 1759 | 21 | 0.95 | 2569 |
| | | | | miR395e | | | | |
| | | | | vvi- | 1760 | 21 | 0.95 | 2570 |
| | | | | miR395f | | | | |
| | | | | vvi- | 1761 | 21 | 0.95 | 2571 |
| | | | | miR395g | | | | |
| | | | | vvi- | 1762 | 21 | 0.95 | 2572 |
| | | | | miR395h | | | | |
| | | | | vvi- | 1763 | 21 | 0.95 | 2573 |
| | | | | miR395i | | | | |
| | | | | vvi- | 1764 | 21 | 0.95 | 2574 |
| | | | | miR395j | | | | |
| | | | | vvi- | 1765 | 21 | 0.95 | 2575 |
| | | | | miR395k | | | | |
| | | | | vvi- | 1766 | 21 | 0.95 | 2576 |
| | | | | miR395l | | | | |
| | | | | vvi- | 1767 | 21 | 0.95 | 2577 |
| | | | | miR395m | | | | |
| | | | | zma- | 1768 | 21 | 0.95 | 2578 |
| | | | | miR395a | | | | |
| | | | | zma- | 1769 | 21 | 0.95 | 2579 |
| | | | | miR395b | | | | |
| | | | | zma- | 1770 | 21 | 0.95 | 2580 |
| | | | | miR395g | | | | |
| | | | | zma- | 1771 | 21 | 0.95 | 2581 |
| | | | | miR395h | | | | |
| | | | | zma- | 1772 | 21 | 0.95 | 2582 |
| | | | | miR395i | | | | |
| | | | | zma- | 1773 | 21 | 0.95 | 2583 |
| | | | | miR395j | | | | |
| | | | | zma- | 1774 | 21 | 0.95 | 2584 |
| | | | | miR395n | | | | |
| | | | | zma- | 1775 | 21 | 0.95 | 2585 |
| | | | | miR395p | | | | |
| | | | | aly- | 1776 | 21 | 0.9 | 2586 |
| | | | | miR395b | | | | |
| | | | | aly- | 1777 | 21 | 0.9 | 2587 |
| | | | | miR395f | | | | |
| | | | | aly- | 1778 | 21 | 0.9 | 2588 |
| | | | | miR395h | | | | |
| | | | | aly- | 1779 | 21 | 0.9 | 2589 |
| | | | | miR395i | | | | |
| | | | | ath- | 1780 | 21 | 0.9 | 2590 |
| | | | | miR395b | | | | |
| | | | | ath- | 1781 | 21 | 0.9 | 2591 |
| | | | | miR395c | | | | |
| | | | | ath- | 1782 | 21 | 0.9 | 2592 |
| | | | | miR395f | | | | |
| | | | | ghr- | 1783 | 21 | 0.9 | 2593 |
| | | | | miR395a | | | | |
| | | | | mtr- | 1784 | 21 | 0.9 | 2594 |
| | | | | miR395p | | | | |
| | | | | osa- | 1785 | 21 | 0.9 | 2595 |
| | | | | miR395a | | | | |
| | | | | osa- | 1786 | 20 | 0.9 | 2596 |
| | | | | miR395a.2 | | | | |
| | | | | osa- | 1787 | 21 | 0.9 | 2597 |
| | | | | miR395c | | | | |
| | | | | osa- | 1788 | 21 | 0.9 | 2598 |
| | | | | miR395f | | | | |
| | | | | osa- | 1789 | 21 | 0.9 | 2599 |
| | | | | miR395t | | | | |
| | | | | sbi- | 1790 | 21 | 0.9 | 2600 |
| | | | | miR395k | | | | |
| | | | | sbi- | 1791 | 21 | 0.9 | 2601 |
| | | | | miR395l | | | | |
| | | | | zma- | 1792 | 21 | 0.9 | 2602 |
| | | | | miR395c | | | | |
| | | | | zma- | 1793 | 21 | 0.9 | 2603 |
| | | | | miR395l | | | | |
| | | | | zma- | 1794 | 21 | 0.9 | 2604 |
| | | | | miR395m | | | | |
| | | | | zma- | 1795 | 21 | 0.9 | 2605 |
| | | | | miR395o | | | | |
| | | | | aly- | 1796 | 21 | 0.86 | 2606 |
| | | | | miR395c | | | | |
| | | | | aqc- | 1797 | 21 | 0.86 | 2607 |
| | | | | miR395a | | | | |
| | | | | aqc- | 1798 | 21 | 0.86 | 2608 |
| | | | | miR395b | | | | |
| | | | | ghr- | 1799 | 21 | 0.86 | 2609 |
| | | | | miR395c | | | | |
| | | | | osa- | 1800 | 21 | 0.86 | 2610 |
| | | | | miR395u | | | | |
| | | | | osa- | 1801 | 21 | 0.86 | 2611 |
| | | | | miR395v | | | | |
| | | | | pab- | 1802 | 21 | 0.86 | 2612 |
| | | | | miR395 | | | | |
| | | | | ptc- | 1803 | 21 | 0.86 | 2613 |
| | | | | miR395a | | | | |
| | | | | zma- | 1804 | 21 | 0.86 | 2614 |
| | | | | miR395k | | | | |
| | | | | bdi- | 1805 | 21 | 0.81 | 2615 |
| | | | | miR395d | | | | |
| | | | | osa- | 1806 | 21 | 0.81 | 2616 |
| | | | | miR395x | | | | |
| | | | | vvi- | 1807 | 21 | 0.81 | 2617 |
| | | | | miR395n | | | | |
| | | | | osa- | 1808 | 22 | 0.76 | 2618 |
| | | | | miR395w | | | | |
| | | | | ppt- | 1809 | 20 | 0.76 | 2619 |
| | | | | miR395 | | | | |
| Predicted | CATGTGT | 21 | | zma- | 239 | 21 | 0.95 | 310 |
| siRNA | TCTCAG | | | miR398a* | | | | |
| 55413 | GTCGCC | | | aqc- | 240 | 21 | 0.9 | 311 |
| | CC/200 | | | miR398b | | | | |
| | | | | bdi- | 241 | 21 | 0.9 | 312 |
| | | | | miR398a | | | | |
| | | | | bdi- | 242 | 21 | 0.9 | 313 |
| | | | | miR398c | | | | |
| | | | | mtr- | 243 | 21 | 0.9 | 314 |
| | | | | miR398b | | | | |
| | | | | mtr- | 244 | 21 | 0.9 | 315 |
| | | | | miR398c | | | | |
| | | | | osa- | 245 | 21 | 0.9 | 316 |
| | | | | miR398b | | | | |
| | | | | ptc- | 246 | 21 | 0.9 | 317 |
| | | | | miR398b | | | | |
| | | | | ptc- | 247 | 21 | 0.9 | 318 |
| | | | | miR398c | | | | |
| | | | | rco- | 248 | 21 | 0.9 | 319 |
| | | | | miR398b | | | | |
| | | | | sbi- | 249 | 21 | 0.9 | 320 |
| | | | | miR398 | | | | |
| | | | | tae- | 250 | 21 | 0.9 | 321 |
| | | | | miR398 | | | | |
| | | | | tcc- | 251 | 21 | 0.9 | 322 |
| | | | | miR398a | | | | |
| | | | | vvi- | 252 | 21 | 0.9 | 323 |
| | | | | miR398b | | | | |
| | | | | vvi- | 253 | 21 | 0.9 | 324 |
| | | | | miR398c | | | | |
| | | | | zma- | 254 | 21 | 0.9 | 325 |
| | | | | miR398a | | | | |
| | | | | zma- | 255 | 21 | 0.9 | 326 |
| | | | | miR398b | | | | |

Table 7: Provided are the sequences of miRNAs 395, 397 and 398, and their homologues/orthologs along with the stem-loop sequences, sequence identifiers and the degree of sequence identity. “1” - 100%.

### Example 3

### Verification of Expression of miRNAs Associated with Increased NUE

[0225] Following identification of miRNAs potentially involved in improvement of maize NUE using bioinformatics tools, as described in Examples 1 and 2 above, the actual mRNA levels in an experiment were determined using reverse transcription assay followed by quantitative Real-Time PCR (qRT-PCR) analysis. RNA levels were compared between different tissues, developmental stages, growing conditions and/or genetic backgrounds incorporated in each experiment. A correlation analysis between mRNA levels in different experimental conditions/genetic backgrounds was applied and used as evidence for the role of the gene in the plant.

[0226] Methods

[0227] Nitrate is the main source of nitrogen available for many crop plants and is often the limiting factor for plant growth and agricultural productivity especially for maize. Mobile nutrients such as N reach their targets and are then recycled, often executed in the form of simultaneous import and export of the nutrients from leaves. This dynamic nutrient cycling is termed remobilization or retranslocation, and thus leaf analyses are highly recommended. For that reason, root and leaf samples were freshly excised from maize plants grown as described above on agar plates containing the plant growth medium Murashige-Skoog (described in Murashige and Skoog, 1962, Physiol Plant 15: 473-497), which consists of macro and microelements, vitamins and amino acids without Ammonium Nitrate (NH₄NO₃) (Duchefa). When applicable, the appropriate ammonium nitrate percentage was added to the agar plates of the relevant experimental groups. Experimental plants were grown on agar containing either optimal ammonium nitrate concentrations (100%, 20.61 mM) to be used as a control group, or under stressful conditions with agar containing 10% or 1% (2.06 mM or 0.2 mM, respectively) ammonium nitrate to be used as stress-induced groups. Total RNA was extracted from the different tissues, using mirVana™ commercial kit (Ambion) following the protocol provided by the manufacturer. For measurement and verification of messenger RNA (mRNA) expression level of all genes, reverse transcription followed by quantitative real time PCR (qRT-PCR) was performed on total RNA extracted from each plant tissue (i.e., roots and leaves) from each experimental group as described above. To elaborate, reverse transcription was performed on 1 μg total RNA, using a miScript Reverse Transcriptase kit (Qiagen), following the protocol suggested by the manufacturer. Quantitative RT-PCR was performed on cDNA (0.1 ng/μl final concentration), using a miScript SYBR GREEN PCR (Qiagen) forward (based on the miR sequence itself) and reverse primers (supplied with the kit). All qRT-PCR reactions were performed in triplicates using an ABI7500 real-time PCR machine, following the recommended protocol for the machine. To normalize the expression level of miRNAs associated with enhanced NUE between the different tissues and growing conditions of the maize plants, normalizer miRNAs were used for comparison. Normalizer miRNAs, which are miRNAs with unchanged expression level between tissues and growing conditions, were custom selected for each experiment. The normalization procedure consists of second-degree polynomial fitting to a reference data (which is the median vector of all the data—excluding outliers) as described by Rosenfeld et al (2008, Nat Biotechnol, 26(4):462-469). A summary of primers for normalizer miRNAs that were used in the qRT-PCR analysis is presented in Table 8 below. Primers for differentially expressed miRNAs and siRNAs used for qRT-PCR analysis are provided in Table 9 below.

TABLE 8
Primers of Normalizer miRNAs used for qRT-PCR analysis

| | | Primer |
|---|---|---|
| Primer Name | Primer Sequence/SEQ ID NO: | Length |
| Predicted zma mir 49063 - | CGAAGGGAATTGAGGGGGCTAG/ | 22 |
| fwd | 327 | |
| Predicted zma mir 49115 - | GAGGAGACCTGGAGGAGACGCT/ | 22 |
| fwd | 328 | |
| Predicted zma mir 49116 - | CGAGGAGGAGAAGCAACACATAGG/ | 24 |
| fwd | 329 | |
| Predicted folded 24-nts-long | GGGATTGGAGGGGATTGAGGTGGA/ | 24 |
| seq 52764 - fwd | 330 | |
| Predicted siRNA 56061 - fwd | GAGGAGGGGATTCGACGAAATGGA/ | 24 |
| | 331 | |

Table 8: Provided are the primers of Normalizer miRNAs used for qRT-PCR analysis.

TABLE 9
Primers of Differential miRNAs and siRNAs to be used for qRT-PCR analysis

| miR Name | Forward Primer Sequence/SEQ ID NO: | Tm |
|---|---|---|
| aqc-miR529 | AGAAGAGAGAGAGCACAACCC/332 | 59.08 |
| ath-miR2936 | CTTGAGAGAGAGAACACAGACG/333 | 58.9 |
| mtr-miR169q | TGAGCCAGGATGACTTGCCGG/334 | 60.99 |
| mtr-miR2647a | ATTCACGGGGACGAACCTCCT/335 | 59.42 |
| mtr-miR395c | ATGAAGTGTTTGGGGGAACTC/336 | 60.06 |
| osa-miR1430 | TGGTGAGCCTTCCTGGCTAAG/337 | 58.76 |
| osa-miR1868 | TCACGGAAAACGAGGGAGCAGCCA/338 | 64.31 |
| osa-miR2096-3p | CCTGAGGGGAAATCGGCGGGA/339 | 62.49 |
| osa-miR395m | GTGAAGTGTTTGGGGGAACTC/340 | 60.3 |
| peu-miR2911 | GGCCGGGGGACGGGCTGGGA/341 | 66.88 |
| Predicted folded 24-nts- | AAAAAAGACTGAGCCGAATTGAAA/342 | 59.13 |
| long seq 50703 | | |
| Predicted folded 24-nts- | AACTAAAACGAAACGGAAGGAGTA/343 | 59.39 |
| long seq 50935 | | |
| Predicted folded 24-nts- | AAGGAGTTTAATGAAGAAAGAGAG/344 | 58.61 |
| long seq 51022 | | |
| Predicted folded 24-nts- | AAGGTGCTTTTAGGAGTAGGACGG/345 | 58.03 |
| long seq 51052 | | |
| Predicted folded 24-nts- | ACAAAGGAATTAGAACGGAATGGC/346 | 59.04 |
| long seq 51215 | | |
| Predicted folded 24-nts- | ACTGATGACGACACTGAGGAGGCT/347 | 61.07 |
| long seq 51381 | | |
| Predicted folded 24-nts- | AGAATCAGGAATGGAACGGCTCCG/348 | 60.7 |
| long seq 51468 | | |
| Predicted folded 24-nts- | AGAATCAGGGATGGAACGGCTCTA/349 | 58.84 |
| long seq 51469 | | |
| Predicted folded 24-nts- | AGAGGAACCAGAGCCGAAGCCGTT/350 | 63.86 |
| long seq 51542 | | |
| Predicted folded 24-nts- | AGAGTCACGGGCGAGAAGAGGACG/351 | 63.66 |
| long seq 51577 | | |
| Predicted folded 24-nts- | AGGACCTAGATGAGCGGGCGGTTT/352 | 63.46 |
| long seq 51691 | | |
| Predicted folded 24-nts- | AGGACGCTGCTGGAGACGGAGAAT/353 | 63.44 |
| long seq 51695 | | |
| Predicted folded 24-nts- | AGGCAAGGTGGAGGACGTTGATGA/354 | 61.79 |
| long seq 51757 | | |
| Predicted folded 24-nts- | AGGGCTGATTTGGTGACAAGGGGA/355 | 61.76 |
| long seq 51802 | | |
| Predicted folded 24-nts- | AGGGCTTGTTCGGTTTGAAGGGGT/356 | 62.47 |
| long seq 51814 | | |
| Predicted folded 24-nts- | ATATAAAGGGAGGAGGTATGGACC/357 | 59.63 |
| long seq 51966 | | |
| Predicted folded 24-nts- | ATCGGTCAGCTGGAGGAGACAGGT/358 | 62.64 |
| long seq 52041 | | |
| Predicted folded 24-nts- | ATCTTTCAACGGCTGCGAAGAAGG/359 | 59.88 |
| long seq 52057 | | |
| Predicted folded 24-nts- | ATGGTAAGAGACTATGATCCAACT/360 | 59.02 |
| long seq 52109 | | |
| Predicted folded 24-nts- | CAATTTTGTACTGGATCGGGGCAT/361 | 59.43 |
| long seq 52212 | | |
| Predicted folded 24-nts- | CAGAGGAACCAGAGCCGAAGCCGT/362 | 64.4 |
| long seq 52218 | | |
| Predicted folded 24-nts- | CGGCTGGACAGGGAAGAAGAGCAC/363 | 63.15 |
| long seq 52299 | | |
| Predicted folded 24-nts- | CTAGAATTAGGGATGGAACGGCTC/364 | 60.55 |
| long seq 52327 | | |
| Predicted folded 24-nts- | GAAACTTGGAGAGATGGAGGCTTT/365 | 58.86 |
| long seq 52347 | | |
| Predicted folded 24-nts- | GAGAGAGAAGGGAGCGGATCTGGT/366 | 60.95 |
| long seq 52452 | | |
| Predicted folded 24-nts- | GAGGGATAACTGGGGACAACACGG/367 | 60.65 |
| long seq 52499 | | |
| Predicted folded 24-nts- | GCGGAGTGGGATGGGGAGTGTTGC/368 | 65.45 |
| long seq 52633 | | |
| Predicted folded 24-nts- | GCTGCACGGGATTGGTGGAGAGGT/369 | 64.68 |
| long seq 52648 | | |
| Predicted folded 24-nts- | GGAGACGGATGCGGAGACTGCTGG/370 | 64.75 |
| long seq 52688 | | |
| Predicted folded 24-nts- | GGCTGCTGGAGAGCGTAGAGGACC/371 | 64.27 |
| long seq 52739 | | |
| Predicted folded 24-nts- | GGGTTTTGAGAGCGAGTGAAGGGG/372 | 61.35 |
| long seq 52792 | | |
| Predicted folded 24-nts- | GGTATTGGGGTGGATTGAGGTGGA/373 | 59.81 |
| long seq 52795 | | |
| Predicted folded 24-nts- | GGTGGCGATGCAAGAGGAGCTCAA/374 | 63.17 |
| long seq 52801 | | |
| Predicted folded 24-nts- | GGTTAGGAGTGGATTGAGGGGGAT/375 | 59.07 |
| long seq 52805 | | |
| Predicted folded 24-nts- | GTCAAGTGACTAAGAGCATGTGGT/376 | 58.88 |
| long seq 52850 | | |
| Predicted folded 24-nts- | GTGGAATGGAGGAGATTGAGGGGA/377 | 59.32 |
| long seq 52882 | | |
| Predicted folded 24-nts- | GTTGCTGGAGAGAGTAGAGGACGT/378 | 59.35 |
| long seq 52955 | | |
| Predicted folded 24-nts- | TGGCTGAAGGCAGAACCAGGGGAG/379 | 64.14 |
| long seq 53118 | | |
| Predicted folded 24-nts- | TGTGGTAGAGAGGAAGAACAGGAC/380 | 60.12 |
| long seq 53149 | | |
| Predicted folded 24-nts- | AGGGACTCTCTTTATTTCCGACGG/381 | 58.77 |
| long seq 53594 | | |
| Predicted folded 24-nts- | AGGGTTCGTTTCCTGGGAGCGCGG/382 | 66.89 |
| long seq 53604 | | |
| Predicted folded 24-nts- | TCCTAGAATCAGGGATGGAACGGC/383 | 59.69 |
| long seq 54081 | | |
| Predicted folded 24-nts- | TGGGAGCTCTCTGTTCGATGGCGC/384 | 64.72 |
| long seq 54132 | | |
| Predicted siRNA 54240 | CATCGCTCAACGGACAAAAGGT/385 | 60.29 |
| Predicted siRNA 54339 | AAGAAACGGGGCAGTGAGATGGAC/386 | 60.83 |
| Predicted siRNA 54631 | AGAAAAGATTGAGCCGAATTGAATT/387 | 58.85 |
| Predicted siRNA 54957 | AAGACGAAGGTAGCAGCGCGATAT/388 | 59.09 |
| Predicted siRNA 54991 | AGAGCCTGTAGCTAATGGTGGG/389 | 58.63 |
| Predicted siRNA 55081 | AGCCAGACTGATGAGAGAAGGAGG/390 | 60.29 |
| Predicted siRNA 55111 | AGGTAGCGGCCTAAGAACGACACA/391 | 61.59 |
| Predicted siRNA 55393 | ACGTTGTTGGAAGGGTAGAGGACG/392 | 60.36 |
| Predicted siRNA 55404 | CAAGTTATGCAGTTGCTGCCT/393 | 58.93 |
| Predicted siRNA 55413 | CATGTGTTCTCAGGTCGCCCC/394 | 59.58 |
| Predicted siRNA 55423 | CCTATATACTGGAACGGAACGGCT/395 | 59.54 |
| Predicted siRNA 55472 | CAGAATGGAGGAAGAGATGGTG/396 | 59.81 |
| Predicted siRNA 55720 | ATCTGTGGAGAGAGAAGGTTGCCC/397 | 59.84 |
| Predicted siRNA 55732 | ATGTCAGGGGGCCATGCAGTAT/398 | 67.59 |
| Predicted siRNA 55806 | CTATATACTGGAACGGAACGGCTT/399 | 60.28 |
| Predicted siRNA 56034 | ATCCTGACTGTGCCGGGCCGGCCC/400 | 58.86 |
| Predicted siRNA 56052 | GACGAGATCGAGTCTGGAGCGAGC/401 | 62.57 |
| Predicted siRNA 56106 | GAGTATGGGGAGGGACTAGGGA/402 | 59.92 |
| Predicted siRNA 56162 | CGAGTTCGCCGTAGAGAAAGCT/403 | 60.11 |
| Predicted siRNA 56205 | GACTGATTCGGACGAAGGAGGGTT/404 | 60.06 |
| Predicted siRNA 56277 | GTCTGAACACTAAACGAAGCACA/405 | 58.82 |
| Predicted siRNA 56307 | GACGTTGTTGGAAGGGTAGAGGAC/406 | 65.21 |
| Predicted siRNA 56353 | GACGAAATAGAGGCTCAGGAGAGG/407 | 60.06 |
| Predicted siRNA 56388 | GGATTCGTGATTGGCGATGGGG/408 | 60.05 |
| Predicted siRNA 56406 | GGTGAGAAACGGAAAGGCAGGACA/409 | 61 |
| Predicted siRNA 56425 | GCTACTGTAGTTCACGGGCCGGCC/410 | 59.09 |
| Predicted siRNA 56443 | GTGTCTGAGCAGGGTGAGAAGGCT/411 | 62.08 |
| Predicted siRNA 56450 | GTTTTGGAGGCGTAGGCGAGGGAT/412 | 62.71 |
| Predicted siRNA 56542 | TGGGACGCTGCATCTGTTGAT/413 | 58.62 |
| Predicted siRNA 56706 | TCTATATACTGGAACGGAACGGCT/414 | 59.84 |
| Predicted siRNA 56837 | GGTATTCGTGAGCCTGTTTCTGGTT/415 | 60 |
| Predicted siRNA 56856 | GTTGTTGGAGGGGTAGAGGACGTC/416 | 60.35 |
| Predicted siRNA 56965 | TGGAAGGAGCATGCATCTTGAG/417 | 59.65 |
| Predicted siRNA 57034 | AATGACAGGACGGGATGGGACGGG/418 | 63.99 |
| Predicted siRNA 57054 | ACGGAACGGCTTCATACCACAATA/419 | 58.33 |
| Predicted siRNA 57088 | TTCTTGACCTTGTAAGACCCA/420 | 59.23 |
| Predicted siRNA 57179 | AGCAGAATGGAGGAAGAGATGG/421 | 60.23 |
| Predicted siRNA 57181 | CTGGACACTGTTGCAGAAGGAGGA/422 | 58.89 |
| Predicted siRNA 57193 | GACGGGCCGACATTTAGAGCACGG/423 | 63.73 |
| Predicted siRNA 57228 | GAAATAGGATAGGAGGAGGGATGA/424 | 63.39 |
| Predicted siRNA 57685 | GGCACGACTAACAGACTCACGGGC/425 | 60.93 |
| Predicted siRNA 57772 | AATCCCGGTGGAACCTCCA/426 | 60.6 |
| Predicted siRNA 57863 | ACACGACAAGACGAATGAGAGAGA/427 | 58.14 |
| Predicted siRNA 57884 | ACGGATAAAAGGTACTCT/428 | 59.05 |
| Predicted siRNA 58292 | AGTATGTCGAAAACTGGAGGGC/429 | 59.94 |
| Predicted siRNA 58362 | ATAAGCACCGGCTAACTCT/430 | 58.83 |
| Predicted siRNA 58665 | ATTCAGCGGGCGTGGTTATTGGCA/431 | 63.42 |
| Predicted siRNA 58721 | ACGACGAGGACTTCGAGACG/432 | 60.11 |
| Predicted siRNA 58872 | CAGCGGGTGCCATAGTCGAT/433 | 58.78 |
| Predicted siRNA 58877 | CAAAGTGGTCGTGCCGGAG/434 | 60.59 |
| Predicted siRNA 58924 | TTTGCGACACGGGCTGCTCT/435 | 59.81 |
| Predicted siRNA 58940 | CATTGCGACGGTCCTCAA/436 | 59.83 |
| Predicted siRNA 59032 | CAGCTTGAGAATCGGGCCGC/437 | 59.7 |
| Predicted siRNA 59102 | CCCTGTGACAAGAGGAGGA/438 | 59.06 |
| Predicted siRNA 59123 | CCTGCTAACTAGTTATGCGGAGC/439 | 59.19 |
| Predicted siRNA 59235 | CGAACTCAGAAGTGAAACC/440 | 59.91 |
| Predicted siRNA 59380 | CTCAACGGATAAAAGGTAC/441 | 59.25 |
| Predicted siRNA 59485 | CGCTTCGTCAAGGAGAAGGGC/442 | 61.21 |
| Predicted siRNA 59626 | GACAGTCAGGATGTTGGCT/443 | 59.24 |
| Predicted siRNA 59659 | GACTGATCCTTCGGTGTCGGCG/444 | 61.61 |
| Predicted siRNA 59846 | GCCGAAGATTAAAAGACGAGACGA/445 | 59.29 |
| Predicted siRNA 59867 | GCCTTTGCCGACCATCCTGA/446 | 59.19 |
| Predicted siRNA 59952 | GGAATCGCTAGTAATCGTGGAT/447 | 58.9 |
| Predicted siRNA 59954 | CTTAACTGGGCGTTAAGTTGCAGGGT/448 | 58.72 |
| Predicted siRNA 59961 | GGAGCAGCTCTGGTCGTGGG/449 | 61.36 |
| Predicted siRNA 59965 | GGAGGCTCGACTATGTTCAAA/450 | 59.14 |
| Predicted siRNA 59966 | GGAGGGATGTGAGAACATGGGC/451 | 59.08 |
| Predicted siRNA 59993 | GGACGAACCTCTGGTGTACC/452 | 59.23 |
| Predicted siRNA 60012 | GGCGCTGGAGAACTGAGGG/453 | 59.79 |
| Predicted siRNA 60081 | GTCCCCTTCGTCTAGAGGC/454 | 60.84 |
| Predicted siRNA 60095 | GTCTGAGTGGTGTAGTTGGT/455 | 58.64 |
| Predicted siRNA 60123 | GGGGGCCTAAATAAAGACT/456 | 59.6 |
| Predicted siRNA 60188 | GTTGGTAGAGCAGTTGGC/457 | 60.44 |
| Predicted siRNA 60285 | TACGTTCCCGGGTCTTGTACA/458 | 60.36 |
| Predicted siRNA 60334 | GTGCTAACGTCCGTCGTGAA/459 | 58.57 |
| Predicted siRNA 60387 | TATGGATGAAGATGGGGGTG/460 | 58.67 |
| Predicted siRNA 60434 | TCAACGGATAAAAGGTACTCCG/461 | 59.28 |
| Predicted siRNA 60750 | TAGCTTAACCTTCGGGAGGG/462 | 58.57 |
| Predicted siRNA 60803 | TGAGAAAGAAAGAGAAGGCTCA/463 | 59.27 |
| Predicted siRNA 60837 | TGCCCAGTGCTTTGAATG/464 | 58.98 |
| Predicted siRNA 60850 | TGCGAGACCGACAAGTCGAGC/465 | 61.28 |
| Predicted siRNA 61382 | TTTGCGACACGGGCTGCTCT/466 | 61.5 |
| Predicted zma mir 47944 | AAAAGAGAAACCGAAGACACAT/467 | 59.24 |
| Predicted zma mir 47976 | AAAGAGGATGAGGAGTAGCATG/468 | 59.04 |
| Predicted zma mir 48061 | AACGTCGTGTCGTGCTTGGGCT/469 | 63.52 |
| Predicted zma mir 48185 | AATACACATGGGTTGAGGAGG/470 | 59.4 |
| Predicted zma mir 48295 | ACCTGGACCAATACATGAGATT/471 | 58.67 |
| Predicted zma mir 48350 | AGAAGCGACAATGGGACGGAGT/472 | 60.05 |
| Predicted zma mir 48351 | AGAAGCGGACTGCCAAGGAGGC/473 | 63.13 |
| Predicted zma mir 48397 | AGAGGGTTTGGGGATAGAGGGAC/474 | 58.7 |
| Predicted zma mir 48457 | AGGAAGGAACAAACGAGGATAAG/475 | 59.46 |
| Predicted zma mir 48486 | AGGATGCTGACGCAATGGGAT/476 | 58.4 |
| Predicted zma mir 48492 | CAGGATGTGAGGCTATTGGGGAC/477 | 58.62 |
| Predicted zma mir 48588 | ATAGGGATGAGGCAGAGCATG/478 | 59.31 |
| Predicted zma mir 48669 | ATGCTATTTGTACCCGTCACCG/479 | 60.29 |
| Predicted zma mir 48708 | ATGTGGATAAAAGGAGGGATGA/480 | 59.61 |
| Predicted zma mir 48771 | CAACAGGAACAAGGAGGACCAT/481 | 60.77 |
| Predicted zma mir 48877 | CCAAGAGATGGAAGGGCAGAGC/482 | 59.08 |
| Predicted zma mir 48879 | CCAAGTCGAGGGCAGACCAGGC/483 | 63.43 |
| Predicted zma mir 48922 | CGACAACGGGACGGAGTTCAA/484 | 59.19 |
| Predicted zma mir 49002 | CTGAGTTGAGAAAGAGATGCT/485 | 58.57 |
| Predicted zma mir 49003 | CTGATGGGAGGTGGAGTTGCAT/486 | 58.41 |
| Predicted zma mir 49011 | CTGGGAAGATGGAACATTTTGGT/487 | 59.54 |
| Predicted zma mir 49053 | GAAGATATACGATGATGAGGAG/488 | 59.23 |
| Predicted zma mir 49070 | GAATCTATCGTTTGGGCTCAT/489 | 59.29 |
| Predicted zma mir 49082 | GACGAGCTACAAAAGGATTCG/490 | 58.52 |
| Predicted zma mir 49123 | GAGGATGGAGAGGTACGTCAGA/491 | 58.88 |
| Predicted zma mir 49155 | GATGACGAGGAGTGAGAGTAGG/492 | 60.06 |
| Predicted zma mir 49161 | GATGGGTAGGAGAGCGTCGTGTG/493 | 60.78 |
| Predicted zma mir 49162 | GATGGTTCATAGGTGACGGTAG/494 | 59.07 |
| Predicted zma mir 49262 | GGGAGCCGAGACATAGAGATGT/495 | 59.5 |
| Predicted zma mir 49269 | GGGCATCTTCTGGCAGGAGGACA/496 | 62.24 |
| Predicted zma mir 49323 | GTGAGGAGTGATAATGAGACGG/497 | 59.07 |
| Predicted zma mir 49369 | GTTTGGGGCTTTAGCAGGTTTAT/498 | 60.12 |
| Predicted zma mir 49435 | TACGGAAGAAGAGCAAGTTTT/499 | 58.74 |
| Predicted zma mir 49445 | TAGAAAGAGCGAGAGAACAAAG/500 | 58.7 |
| Predicted zma mir 49609 | TCCATAGCTGGGCGGAAGAGAT/501 | 59.06 |
| Predicted zma mir 49638 | TCGGCATGTGTAGGATAGGTG/502 | 59.02 |
| Predicted zma mir 49761 | TGATAGGCTGGGTGTGGAAGCG/503 | 60.69 |
| Predicted zma mir 49762 | TGATATTATGGACGACTGGTT/504 | 59.18 |
| Predicted zma mir 49787 | TGCAAACAGACTGGGGAGGCGA/505 | 62.45 |
| Predicted zma mir 49816 | TGGAAGGGCCATGCCGAGGAG/506 | 62.77 |
| Predicted zma mir 49985 | TTGAGCGCAGCGTTGATGAGC/507 | 60.76 |
| Predicted zma mir 50021 | TTGGATAACGGGTAGTTTGGAGT/508 | 58.63 |
| Predicted zma mir 50077 | TTTGGCTGACAGGATAAGGGAG/509 | 59.17 |
| Predicted zma mir 50095 | TTTTCATAGCTGGGCGGAAGAG/510 | 60 |
| Predicted zma mir 50110 | AACTTTAAATAGGTAGGACGGCGC/511 | 60.28 |
| Predicted zma mir 50144 | AGCTGCCGACTCATTCACCCA/512 | 60.31 |
| Predicted zma mir 50204 | GGAATGTTGTCTGGTTCAAGG/513 | 58.54 |
| Predicted zma mir 50261 | TGTAATGTTCGCGGAAGGCCAC/514 | 59.86 |
| Predicted zma mir 50263 | TGTACGATGATCAGGAGGAGGT/515 | 59.46 |
| Predicted zma mir 50266 | TGTGTTCTCAGGTCGCCCCCG/516 | 62.92 |
| Predicted zma mir 50267 | TGTTGGCATGGCTCAATCAAC/517 | 59.39 |
| Predicted zma mir 50318 | ACTAAAAAGAAACAGAGGGAG/518 | 58.6 |
| Predicted zma mir 50460 | CGCTGACGCCGTGCCACCTCAT/519 | 66.1 |
| Predicted zma mir 50517 | GACCGGCTCGACCCTTCTGC/520 | 61.69 |
| Predicted zma mir 50545 | GCCTGGGCCTCTTTAGACCT/521 | 60.11 |
| Predicted zma mir 50578 | GTAGGATGGATGGAGAGGGTTC/522 | 60.29 |
| Predicted zma mir 50601 | CTAGCCAAGCATGATTTGCCCG/523 | 58.66 |
| Predicted zma mir 50611 | TCAACGGGCTGGCGGATGTG/524 | 61.92 |
| Predicted zma mir 50670 | TGGTAGGATGGATGGAGAGGGT/525 | 58.52 |
| zma-miR169c* | GGCAAGTCTGTCCTTGGCTACA/526 | 58.62 |
| zma-miR1691 | GCTAGCCAGGGATGATTTGCCTG/527 | 59.74 |
| zma-miR1691* | GCGGCAAATCATCCCTGCTACC/528 | 60.3 |
| zma-miR172e | GGCGGAATCTTGATGATGCTGCAT/529 | 60.06 |
| zma-miR397a | TCATTGAGCGCAGCGTTGATG/530 | 58.55 |
| zma-miR398b* | GGGGCGGACTGGGAACACATG/531 | 61.85 |
| zma-miR399f* | GGGCAACTTCTCCTTTGGCAGA/532 | 59.14 |
| zma-miR399g | TGCCAAAGGGGATTTGCCCGG/533 | 62.08 |
| zma-miR529 | GGCAGAAGAGAGAGAGTACAGCCT/534 | 59.1 |
| zma-miR827 | TGGCTTAGATGACCATCAGCAAACA/535 | 58.56 |

Table 9. Provided are the forward primer sequences of Differential miRNAs and siRNAs to be used for qRT-PCR analysis, along with the melting temperature (Tm) of the primer and the corresponding mir name.

Alternative RT-PCR Validation Method of Selected microRNAs of the Invention

[0228] A novel microRNA quantification method has been applied using stem-loop RT followed by PCR analysis (Chen C, Ridzon D A, Broomer A J, Zhou Z, Lee D H, Nguyen J T, Barbisin M, Xu N L, Mahuvakar V R, Andersen M R, Lao K Q, Livak K J, Guegler K J. 2005, Nucleic Acids Res 33(20):e179; Varkonyi-Gasic E, Wu R, Wood M, Walton E F, Hellens R P. 2007, Plant Methods 3:12) (see FIG. 2). This highly accurate method allows the detection of less abundant miRNAs. In this method, stem-loop RT primers are used, which provide higher specificity and efficiency to the reverse transcription process. While the conventional method relies on polyadenylated (poly (A)) tail and thus becomes sensitive to methylation because of the susceptibility of the enzymes involved, in this novel method the reverse transcription step is transcript specific and insensitive to methylation. Reverse transcriptase reactions contained RNA samples including purified total RNA, 50 nM stem-loop RT primer (see Table 10, synthesized by Sigma), and using the SuperScript II reverse transcriptase (Invitrogen). A mix of up to 12 stem-loop RT primers may be used in each reaction, and the forward primers are such that the last 6 nucleotides are replaced with a GC rich sequence.

TABLE 10
Stem Loop Reverse Transcriptase Primers for RT-PCR Validation

| | | | Primer |
|---|---|---|---|
| | Primer | | Length |
| Mir Name | Name | Primer Sequence/SEQ ID NO: | (bp) |
| Predicted | Pred zma | GTCGTATCCAGTGCAGGGTCCGAGGTATTC | 50 |
| siRNA 57181 | 57181-SL- | GCACTGGATACGACTCATCC/2659 | |
| | RT | | |
| | Pred zma | CGGCGGGAAATAGGATAGGAGGAG/2660 | 24 |
| | 57181-SL-F | | |
| Predicted zma | Pred zma | GTCGTATCCAGTGCAGGGTCCGAGGTATTC | 50 |
| mir 49638 | 49638-SL- | GCACTGGATACGACCACCTA/2661 | |
| | RT | | |
| | Pred zma | CGCGCTCGGCATGTGTAGGA/2662 | 20 |
| | 49638-SL-F | | |
| Predicted | Pred zma | GTCGTATCCAGTGCAGGGTCCGAGGTATTC | 50 |
| siRNA 55111 | 55111-SL- | GCACTGGATACGACTGTGTC/2663 | |
| | RT | | |
| | Pred zma | CGTCAGGTAGCGGCCTAAGAAC/2664 | 22 |
| | 55111-SL-F | | |
| zma- | zma- | GTCGTATCCAGTGCAGGGTCCGAGGTATTC | 50 |
| miR1691* | miR1691*- | GCACTGGATACGACGGTAGC/2665 | |
| | SL-RT | | |
| | zma- | CGCGCGGCAAATCATCCCT/2666 | 19 |
| | miR1691*- | | |
| | SL-F | | |
| Predicted | Pred zma | GTCGTATCCAGTGCAGGGTCCGAGGTATTC | 50 |
| folded 24-nts- | 51802-SL- | GCACTGGATACGACTCCCCT/2667 | |
| long seq | RT | | |
| 51802 | Pred zma | CTGCAGGGCTGATTTGGTGACA/2668 | 22 |
| | 51802-SL-F | | |
| Predicted | Pred zma | GTCGTATCCAGTGCAGGGTCCGAGGTATTC | 50 |
| siRNA 57685 | 57685-SL- | GCACTGGATACGACTGGAGG/2669 | |
| | RT | | |
| | Pred zma | CGCGCAATCCCGGTGGAA/2670 | 18 |
| | 57685-SL-F | | |
| osa- | osa- | GTCGTATCCAGTGCAGGGTCCGAGGTATTC | 50 |
| miR2096-3p | miR2096- | GCACTGGATACGACTCCCGC/2671 | |
| | 3p-SL-RT | | |
| | osa- | GCCGCCTGAGGGGAAATCG/2672 | 19 |
| | miR2096- | | |
| | 3p-SL-F | | |
| Predicted zma | Pred zma | GTCGTATCCAGTGCAGGGTCCGAGGTATTC | 50 |
| mir 49070 | 49070-SL- | GCACTGGATACGACATGAGC/2673 | |
| | RT | | |
| | Pred zma | CGGCGGGAATCTATCGTTTGG/2674 | 21 |
| | 49070-SL-F | | |
| Predicted | Pred zma | GTCGTATCCAGTGCAGGGTCCGAGGTATTC | 50 |
| folded 24-nts- | 52850-SL- | GCACTGGATACGACACCACA/2675 | |
| long seq | RT | | |
| 52850 | Pred zma | CGGCGGGTCAAGTGACTAAGAGCA/2676 | 24 |
| | 52850-SL-F | | |
| Predicted | Pred zma | GTCGTATCCAGTGCAGGGTCCGAGGTATTC | 50 |
| folded 24-nts- | 52801-SL- | GCACTGGATACGACTTGAGC/2677 | |
| long seq | RT | | |
| 52801 | Pred zma | CCGGTGGCGATGCAAGAGGA/2678 | 20 |
| | 52801-SL-F | | |
| Predicted | Pred zma | GTCGTATCCAGTGCAGGGTCCGAGGTATTC | 50 |
| folded 24-nts- | 51215-SL- | GCACTGGATACGACGCCATT/2679 | |
| long seq | RT | | |
| 51215 | Pred zma | CGGCGGACAAAGGAATTAGAACGG/2680 | 24 |
| | 51215-SL-F | | |
| Predicted | Pred zma | GTCGTATCCAGTGCAGGGTCCGAGGTATTC | 50 |
| folded 24-nts- | 52452-SL- | GCACTGGATACGACACCAGA/2681 | |
| long seq | RT | | |
| 52452 | Pred zma | CGTCGAGAGAGAAGGGAGCGGA/2682 | 22 |
| | 52452-SL-F | | |
| Predicted zma | Pred zma | GTCGTATCCAGTGCAGGGTCCGAGGTATTC | 50 |
| mir 49762 | 49762-SL- | GCACTGGATACGACAACCAG/2683 | |
| | RT | | |
| | Pred zma | CGGCGGTGATATTATGGACGA/2684 | 21 |
| | 49762-SL-F | | |
| Predicted zma | Pred zma | GTCGTATCCAGTGCAGGGTCCGAGGTATTC | 50 |
| mir 50601 | 50601-SL- | GCACTGGATACGACCGGGCA/2685 | |
| | RT | | |
| | Pred zma | CGCGCTAGCCAAGCATGATT/2686 | 20 |
| | 50601-SL-F | | |
| zma-miR827 | zma- | GTCGTATCCAGTGCAGGGTCCGAGGTATTC | 50 |
| | miR827-SL- | GCACTGGATACGACTGTTTG/2687 | |
| | RT | | |
| | zma- | CGGCGGTTAGATGACCATCAG/2688 | 21 |
| | miR827-SL- | | |
| | F | | |
| zma- | zma- | GTCGTATCCAGTGCAGGGTCCGAGGTATTC | 50 |
| miR395b | miR395b | GCACTGGATACGACGAGTTC/2689 | |
| | SL-RT | | |
| | zma- | CGCGCGTGAAGTGTTTGGGG/2690 | 20 |
| | miR395b- | | |
| | SL-F | | |

Table 10: Provided are the stem loop reverse transcriptase primers for RT-PCR validation. “F” = forward primer; “RT” reverse primer.

### Example 4

### Results of RT-PCR Validation of Selected miRNAs of the Invention

[0229] An RT-PCR analysis was run on selected microRNAs of the invention, using the stem-loop RT primers as described in Table 10 and Example 3 above. Total RNA was extracted from either leaf or root tissues of maize plants grown as described above, and was used as a template for RT-PCR analysis. Expression level and directionality of several up-regulated and down-regulated microRNAs that were found to be differential on the microarray analysis were verified. Results are summarized in Table 11 below.

TABLE 11
Summary of All RT-PCR Verification Results on Selected miRNAs

| Corn | | | Duration of | | Fold | | |
|---|---|---|---|---|---|---|---|
| Variety | Direction | Tissue | Treatment | Mir Name | Change | p-Value | Notes |
| 5605 | Up | Root | 7 d | Predicted zma mir | 1.96 | 3.60E−03 | |
| | | | | 48879 | | | |
| | | | 7 d | Predicted zma mir | 1.55 | 4.40E−02 | |
| | | | | 48486 | | | |
| | Down | Root | 7 d | Predicted zma mir | 1.54 | 2.30E−03 | |
| | | | | 48492 | | | |
| | Up | Leaf | 7 d | zma-miR172e | 1.57 | 8.60E−03 | |
| GSO308 | Up | Root | 14 d | zma-miR827 | 1.68 | 3.20E−03 | |
| | | | 14 d | zma-miR827 | 1.62 | 1.30E−02 | 1% vs 10% |
| | | | 14 d | Predicted zma mir | 2.42 | 2.30E−02 | 1% vs 10% |
| | | | | 48486 | | | |
| | | | 14 d | Predicted zma mir | 1.57 | 4.60E−02 | 1% vs 10% |
| | | | | 48492 | | | |
| | | | 14 d | Predicted zma mir | 1.57 | 1.00E−02 | |
| | | | | 48879 | | | |
| | | | 9 d | Predicted zma mir | 4.93 | 3.60E−04 | |
| | | | | 49638 | | | |
| | | | 14 d | Predicted zma mir | 9.73 | 1.60E−03 | |
| | | | | 49638 | | | |
| | | | 14 d | Predicted folded | 4.67 | 5.60E−02 | |
| | | | | 24-nts-long seq | | | |
| | | | | 52850 | | | |
| | Down | Root | 7 d | zma-miR1691 | 7.37 | 7.00E−03 | |
| | | | 9 d | zma-miR1691* | 2.26 | 6.50E−05 | |
| | | | 7 d | zma-miR395b | 1.62 | 8.00E−03 | 1% vs |
| | | | | | | | control |
| | | | 14 d | zma-miR395b | 3.16 | 1.30E−03 | 1% vs |
| | | | | | | | control |
| | | | 14 d | zma-miR395b | 3.71 | 4.50E−03 | 10% vs |
| | | | | | | | control |
| | | | 9 d | Predicted zma mir | 1.78 | 8.80E−05 | |
| | | | | 50601 | | | |
| | | | 14 d | Predicted zma mir | 3.35 | 8.70E−04 | |
| | | | | 50601 | | | |
| | Down | Leaf | 7 d | Predicted zma mir | 1.91 | 1.40E−03 | |
| | | | | 50601 | | | |

Table 11: provided are the RT-PCR validation results in corn varieties treated with either 1% or 10% Nitrogen vs. optimal 100% Nitrogen for the indicated time periods.

### Example 5

[0230] Gene Cloning and Creation of Binary Vectors for Plant Expression

[0231] Cloning Strategy—the validated dsRNAs (stem-loop) were cloned into pORE-E1 (Accession number: AY562534) binary vectors for the generation of transgenic plants. The full-length open reading frame (ORF) comprising of the hairpin sequence of each selected miRNA, was synthesized by Genscript (Israel). The resultant clone was digested with appropriate restriction enzymes and inserted into the Multi Cloning Site (MCS) of a similarly digested binary vector through ligation using T4 DNA ligase enzyme (Promega, Madison, Wis., USA). FIG. 1 is a plasmid map of the binary vector pORE-E1, used for plant transformation.

### Example 6

### Generation of Transgenic Model Plants Expressing miRNAs or siRNAs or Sequences Regulating Same of Some Embodiments of the Invention

[0232] Arabidoposis thaliana transformation was performed using the floral dip procedure following a slightly modified version of the published protocol (Clough and Bent, 1998, Plant J 16(6): 735-43; Desfeux et al, 2000, Plant Physiol. 123(3): 895-904). Briefly, T₀ Plants were planted in small pots filled with soil. The pots were covered with aluminum foil and a plastic dome, kept at 4° C. for 3-4 days, then uncovered and incubated in a growth chamber at 24° C. under 16 hr light:8 hr dark cycles. A week prior to transformation all individual flowering stems were removed to allow for growth of multiple flowering stems instead. A single colony of Agrobacterium (GV3101) carrying the binary vectors (pORE-E1), harboring the NUE miRNA hairpin sequences with additional flanking sequences both upstream and downstream of it (general sequences about 100-150 bp), was cultured in LB medium supplemented with kanamycin (50 mg/L) and gentamycin (25 mg/L). Three days prior to transformation, each culture was incubated at 28° C. for 48 hrs, shaking at 180 rpm. The starter culture was split the day before transformation into two cultures, which were allowed to grow further at 28° C. for 24 hours at 180 rpm. Pellets containing the agrobacterium cells were obtained by centrifugation of the cultures at 5000 rpm for 15 minutes. The pellets were resuspended in an infiltration medium (10 mM MgCl₂, 5% sucrose, 0.044 μM BAP (Sigma) and 0.03% Tween 20) in double-distilled water.

[0233] Transformation of T₀ plants was performed by inverting each plant into the Agrobacterium suspension, keeping the flowering stem submerged for 5 minutes. Following inoculation, each plant was blotted dry for 5 minutes on both sides, and placed sideways on a fresh covered tray for 24 hours at 22° C. Transformed (transgenic) plants were then uncovered and transferred to a greenhouse for recovery and maturation. The transgenic T₀ plants were grown in the greenhouse for 3-5 weeks until the seeds are ready. The seeds were then harvested from plants and kept at room temperature until sowing.

### Example 7

### Selection of Transgenic Arabidopsis Plants Expressing miRNAs of Some Embodiments of the Invention According to Expression Level

[0234] Arabidopsis seeds were sown. One to 2 weeks old seedlings were sprayed with a non-volatile herbicide, Basta (Bayer) at least twice every few days. Only resistant plants, which are heterozygous for the transgene, survived. PCR on the genomic gene sequence was performed on the surviving seedlings using primers pORE-F2 (fwd, 5′-TTTAGCGATGAACTTCACTC-3′/SEQ ID NO:1026) and a custom designed reverse primer based on each miR's sequence.

### Example 8

### Nitrogen Deficiency Tolerance of Arabidopsis Plants Overexpressing Selected MicroRNAs Surpasses that of Control Plants

[0235] Arabidopsis seeds were obtained from the Arabidopsis Biological Resource Center (ABRC) at The Ohio State University. Plants were grown at 22° C. under a 16 hours light:8 hours dark regime. Plants were grown for four weeks until seedlings reached flowering stage, and transferred to pots with low-nitrogen containing soil. Next, plants were divided into control and experimental groups, where experimental plants were over-expressing one of the three selected miRNAs associated with increased NUE; miR395, miR397 or miR398. The stem loop sequences of the above microRNAs were cloned into pORE-E1 binary vector for the generation of transgenic plants as specified in Example 6 above. A total of 4 lines per each of the selected microRNAs were included. As an internal control for the experimental group, plants expressing an empty vector (strain pORE-E1) were included. Both plant groups were irrigated twice weekly with alternating tap water and water containing either 1% nitrogen, to induce chronic N limiting condition or transient low nitrate availability, or 100% nitrogen, to supplement the soil with all fertilizer needs for optimal plant growth. The experiment continued for 17 days, after which plants were harvested and dry weighed. For each microRNA line tested for over-expression (including control plants expressing vector only), plants were pooled together (20-35 total) to serve as biological repeats. Total dry weight of control and experimental plant groups was analyzed and data were summarized in Table 12 below.

TABLE 12
Summary of Over-expression Experiments in Arabidopsis

| | | | % Change |
|---|---|---|---|
| | | | Compared to |
| | | | control grown |
| | Experimental | | under identical |
| Treatment | Sample/Line | Plant Dry Weight | growth conditions |
| No Treatment | Control | 0.425 +− 0.016 | 100 |
| | 395-7 | 0.466 +− 0.023 | 109.646 |
| | 397-2 | 0.494 +− 0.015 | 116.184 |
| | 398-6 | 0.500 +− 0.033 | 117.54 |
| Fertilizer 1% | Control | 0.158 +− 0.012 | 100 |
| | 395-7 | 0.171 +− 0.012 | 108.465 |
| | 397-2 | 0.188 +− 0.012 | 119.135 |
| | 398-6 | 0.223 +− 0.013 | 141.166 |

Table 12: Summary of experimental results showing the effect of over-expression of miRNAs of some embodiments of the invention of nitrogen use efficiency of a plant.
“no treatment” = conditions with 100% nitrogen for optimal plant growth;

[0236] As shown in Table 12 above, over-expression of miRNA395, miRNA397 and miRNA398 in plants confers increased biomass of a plant under either normal conditions (i.e., with optimal nitrogen supply) or under nitrogen-deficient conditions, hence increased nitrogen utilization efficiency as compared to control plants under identical conditions.

### Example 9

### Evaluating Changes in Root Architecture in Transgenic Plants

[0237] Root architecture of the plant governs multiple key agricultural traits. Root size and depth have been shown to logically correlate with drought tolerance and enhanced NUE, since deeper and more branched root systems provide better soil coverage and can access water and nutrients stored in deeper soil layers.

[0238] To test whether the transgenic plants produce a modified root structure, plants were grown in agar plates placed vertically. A digital picture of the plates was taken every few days and the maximal length and total area covered by the plant roots were assessed. From every construct created, several independent transformation events were checked in replicates. To assess significant differences between root features, statistical test, such as a Student's t-test, was employed in order to identify enhanced root features and to provide a statistical value to the findings.

### Example 10

### Testing for Increased Nitrogen Use Efficiency (NUE)

[0239] To analyze whether the transgenic Arabidopsis plants are more responsive to nitrogen, plants were grown in two different nitrogen concentrations: (1) optimal nitrogen concentration (100% NH₄NO₃, which corresponds to 20.61 mM) or (2) nitrogen deficient conditions (1% or 10% NH₄NO₃, which corresponds to 0.2 and 2.06 mM, respectively). Plants were allowed to grow until seed production followed by an analysis of their overall size, time to flowering, yield, protein content of shoot and/or grain, and seed production. The parameters checked are each of the overall size of the plant, wet and dry weight, the weight of the seeds yielded, the average seed size and the number of seeds produced per plant. Other parameters that were tested include: the chlorophyll content of leaves (as nitrogen plant status and the degree of leaf greenness are highly correlated), amino acid and the total protein content of the seeds or other plant parts such as leaves or shoots and oil content. Transformed plants not exhibiting substantial physiological and/or morphological effects, or exhibiting higher measured parameters levels than wild-type plants, were identified as nitrogen use efficient plants.

### Example 11

### Method for Generating Transgenic Maize Plants with Enhanced or Reduced MicroRNA Regulation of Target Genes

[0240] Target prediction enables two contrasting strategies; an enhancement (positive) or a reduction (negative) of dsRNA regulation. Both these strategies have been used in plants and have resulted in significant phenotype alterations. For complete in-vivo assessment of the phenotypic effects of the differential dsRNAs in this invention, over-expression and down-regulation methods were implemented on all dsRNAs found to associate with NUE as listed in Tables 1-4.

[0241] Basically, stress tolerance is achieved by down-regulation of those dsRNA sequences which were found to be downregulated, or upregulation of those dsRNA sequences which were found to be upregulated, under limiting nitrogen conditions.

[0242] Expressing a microRNA-Resistant Target

[0243] In this method, silent mutations are introduced in the microRNA binding site of the target gene so that the DNA and resulting RNA sequences are changed to prevent microRNA binding, but the amino acid sequence of the protein is unchanged.

[0244] Expressing a Target-Mimic Sequence

[0245] Plant microRNAs usually lead to cleavage of their targeted gene, with this cleavage typically occurring between bases 10 and 11 of the microRNA. This position is therefore especially sensitive to mismatches between the microRNA and the target. It was found that expressing a DNA sequence that could potentially be targeted by a microRNA, but contains three extra nucleotides (ATC) between the two nucleotides that are predicted to hybridize with bases 10-11 of the microRNA (thus creating a bulge in that position), can inhibit the regulation of that microRNA on its native targets (Franco-Zorilla J M et al., Nat Genet 2007; 39(8):1033-1037).

[0246] This type of sequence is referred to as a “target-mimic”. Inhibition of the microRNA regulation is presumed to occur through physically capturing the microRNA by the target-mimic sequence and titering-out the microRNA, thereby reducing its abundance. This method was used to reduce the amount and, consequentially, the regulation of microRNA 399 in Arabidopsis.

TABLE 13
miRNA-Resistant Target Examples for Selected miRNAs of the Invention

| | | | | | Original | Mutated | NCBI |
|---|---|---|---|---|---|---|---|
| | Mature | Homolog | | Protein | Nucleotide | Nucleotide | Mir |
| Mir | Sequence/ | NCBI | | SEQ ID | SEQ | SEQ | Binding |
| name | seq id: | Accession | Organism | NO: | ID NO: | ID NO: | Site |
| ath- | CTTGAG | ACN26323 | Zea | 563 | 603 | 616 | 784 - |
| miR29 | AGAGAG | | mays | | | | 805 |
| 36 | AACACA | | | | | 617 | 784 - |
| | GACG/59 | | | | | | 805 |
| | | | | | | 618 | 784 - |
| | | | | | | | 805 |
| | | | | | | 619 | 784 - |
| | | | | | | | 805 |
| | | | | | | 620 | 784 - |
| | | | | | | | 805 |
| Predicted | TTGAGC | XP_002448765 | Sorghum | 547 | 587 | 621 | 665 - |
| zma | GCAGCG | | bicolor | | | | 685 |
| mir | TTGATG | | | | | 622 | 665 - |
| 49985 | AGC/106 | | | | | | 685 |
| | | | | | | 623 | 665 - |
| | | | | | | | 685 |
| | | | | | | 624 | 665 - |
| | | | | | | | 685 |
| | | | | | | 625 | 665 - |
| | | | | | | | 685 |
| | | XP_002458747 | Sorghum | 548 | 588 | 626 | 780 - |
| | | | bicolor | | | | 800 |
| | | | | | | 627 | 780 - |
| | | | | | | | 800 |
| | | | | | | 628 | 780 - |
| | | | | | | | 800 |
| | | | | | | 629 | 780 - |
| | | | | | | | 800 |
| | | | | | | 630 | 780 - |
| | | | | | | | 800 |
| | | NP_001141205 | Zea | 539 | 579 | 631 | 740 - |
| | | | mays | | | | 760 |
| | | | | | | 632 | 740 - |
| | | | | | | | 760 |
| | | | | | | 633 | 740 - |
| | | | | | | | 760 |
| | | | | | | 634 | 740 - |
| | | | | | | | 760 |
| | | | | | | 635 | 740 - |
| | | | | | | | 760 |
| | | NP_001105875 | Zea | 541 | 581 | 636 | 851 - |
| | | | mays | | | | 871 |
| | | | | | | 637 | 851 - |
| | | | | | | | 871 |
| | | | | | | 638 | 851 - |
| | | | | | | | 871 |
| | | | | | | 639 | 851 - |
| | | | | | | | 871 |
| | | | | | | 640 | 851 - |
| | | | | | | | 871 |
| | | NP_001146658 | Zea | 540 | 580 | 641 | 765 - |
| | | | mays | | | | 785 |
| | | | | | | 642 | 765 - |
| | | | | | | | 785 |
| | | | | | | 643 | 765 - |
| | | | | | | | 785 |
| | | | | | | 644 | 765 - |
| | | | | | | | 785 |
| | | | | | | 645 | 765 - |
| | | | | | | | 785 |
| | | ACN27868 | Zea | 572 | 612 | 646 | 893 - |
| | | | mays | | | | 913 |
| | | | | | | 647 | 893 - |
| | | | | | | | 913 |
| | | | | | | 648 | 893 - |
| | | | | | | | 913 |
| | | | | | | 649 | 893 - |
| | | | | | | | 913 |
| | | | | | | 650 | 893- |
| | | | | | | | 913 |
| Predicted | TGGAAG | NP_001168448 | Zea | 549 | 589 | 651 | 336 - |
| zma | GGCCAT | | mays | | | | 356 |
| mir | GCCGAG | | | | | 652 | 336 - |
| 49816 | GAG/105 | | | | | | 356 |
| | | | | | | 653 | 336 - |
| | | | | | | | 356 |
| | | | | | | 654 | 336 - |
| | | | | | | | 356 |
| | | | | | | 655 | 336 - |
| | | | | | | | 356 |
| aqc- | AGAAGA | AAX83875 | Zea | 553 | 593 | 656 | 2774 - |
| miR529 | GAGAGA | | mays | | | | 2794 |
| | GCACAA | | subsp. | | | 657 | 2774 - |
| | CCC/58 | | mays | | | | 2794 |
| | | | | | | 658 | 2774 - |
| | | | | | | | 2794 |
| | | | | | | 659 | 2774 - |
| | | | | | | | 2794 |
| | | | | | | 660 | 2774 - |
| | | | | | | | 2794 |
| | | ACN30570 | Zea | 552 | 592 | 661 | 889 - |
| | | | mays | | | | 909 |
| | | | | | | 662 | 889 - |
| | | | | | | | 909 |
| | | | | | | 663 | 889 - |
| | | | | | | | 909 |
| | | | | | | 664 | 889 - |
| | | | | | | | 909 |
| | | | | | | 665 | 889 - |
| | | | | | | | 909 |
| | | NP_001137049 | Zea | 568 | 608 | 666 | 585 - |
| | | | mays | | | | 605 |
| | | | | | | 667 | 585 - |
| | | | | | | | 605 |
| | | | | | | 668 | 585 - |
| | | | | | | | 605 |
| | | | | | | 669 | 585 - |
| | | | | | | | 605 |
| | | | | | | 670 | 585 - |
| | | | | | | | 605 |
| | | ACR34442 | Zea | 562 | 602 | 671 | 1040 - |
| | | | mays | | | | 1060 |
| | | | | | | 672 | 1040 - |
| | | | | | | | 1060 |
| | | | | | | 673 | 1040 - |
| | | | | | | | 1060 |
| | | | | | | 674 | 1040 - |
| | | | | | | | 1060 |
| | | | | | | 675 | 1040 - |
| | | | | | | | 1060 |
| | | ACF86782 | Zea | 544 | 584 | 676 | 923 - |
| | | | mays | | | | 943 |
| | | | | | | 677 | 923 - |
| | | | | | | | 943 |
| | | | | | | 678 | 923 - |
| | | | | | | | 943 |
| | | | | | | 679 | 923 - |
| | | | | | | | 943 |
| | | | | | | 680 | 923 - |
| | | | | | | | 943 |
| | | XP_002438971 | Sorghum | 559 | 599 | 681 | 1422 - |
| | | | bicolor | | | | 1442 |
| | | | | | | 682 | 1422 - |
| | | | | | | | 1442 |
| | | | | | | 683 | 1422 - |
| | | | | | | | 1442 |
| | | | | | | 684 | 1422 - |
| | | | | | | | 1442 |
| | | | | | | 685 | 1422 - |
| | | | | | | | 1442 |
| | | NP_001136945 | Zea | 543 | 583 | 686 | 926 - |
| | | | mays | | | | 946 |
| | | | | | | 687 | 926 - |
| | | | | | | | 946 |
| | | | | | | 688 | 926 - |
| | | | | | | | 946 |
| | | | | | | 689 | 926 - |
| | | | | | | | 946 |
| | | | | | | 690 | 926 - |
| | | | | | | | 946 |
| | | CAB56631 | Zea | 575 | 615 | 691 | 589 - |
| | | | mays | | | | 609 |
| | | | | | | 692 | 589 - |
| | | | | | | | 609 |
| | | | | | | 693 | 589 - |
| | | | | | | | 609 |
| | | | | | | 694 | 589 - |
| | | | | | | | 609 |
| | | | | | | 695 | 589 - |
| | | | | | | | 609 |
| osa- | GTGAAG | ACN34023 | Zea | 545 | 585 | 696 | 527 - |
| miR395m | TGTTTGG | | mays | | | | 547 |
| | GGGAAC | | | | | 697 | 527 - |
| | TC/63 | | | | | | 547 |
| | | | | | | 698 | 527 - |
| | | | | | | | 547 |
| | | | | | | 699 | 527 - |
| | | | | | | | 547 |
| | | | | | | 700 | 527 - |
| | | | | | | | 547 |
| Predicted | AGGCAA | NP_001145778 | Zea | 560 | 600 | 701 | 685 - |
| folded | GGTGGA | | mays | | | | 708 |
| 24-nts- | GGACGT | | | | | 702 | 685 - |
| long | TGATGA/ | | | | | | 708 |
| seq | 69 | | | | | 703 | 685 - |
| 51757 | | | | | | | 708 |
| | | | | | | 704 | 685 - |
| | | | | | | | 708 |
| | | | | | | 705 | 685 - |
| | | | | | | | 708 |
| mtr- | ATGAAG | ACN34023 | Zea | 546 | 586 | 706 | 527 - |
| miR395c | TGTTTGG | | mays | | | | 547 |
| | GGGAAC | | | | | 707 | 527 - |
| | TC/62 | | | | | | 547 |
| | | | | | | 708 | 527 - |
| | | | | | | | 547 |
| | | | | | | 709 | 527 - |
| | | | | | | | 547 |
| | | | | | | 710 | 527 - |
| | | | | | | | 547 |
| Predicted | AGCTGC | AAS82604 | Zea | 542 | 582 | 711 | 144 - |
| zma | CGACTC | | mays | | | | 164 |
| mir | ATTCACC | | | | | 712 | 144 - |
| 50144 | CA/108 | | | | | | 164 |
| | | | | | | 713 | 144 - |
| | | | | | | | 164 |
| | | | | | | 714 | 144 - |
| | | | | | | | 164 |
| | | | | | | 715 | 144 - |
| | | | | | | | 164 |
| Predicted | GATGAC | NP_001151090 | Zea | 551 | 591 | 716 | 94 - |
| zma | GAGGAG | | mays | | | | 115 |
| mir | TGAGAG | | | | | 717 | 94 - |
| 49155 | TAGG/100 | | | | | | 115 |
| | | | | | | 718 | 94 - |
| | | | | | | | 115 |
| | | | | | | 719 | 94 - |
| | | | | | | | 115 |
| | | | | | | 720 | 94 - |
| | | | | | | | 115 |
| Predicted | AGAAGC | ACN36648 | Zea | 569 | 609 | 721 | 1624 - |
| zma | GGACTG | | mays | | | | 1645 |
| mir | CCAAGG | | | | | 722 | 1624 - |
| 48351 | AGGC/88 | | | | | | 1645 |
| | | | | | | 723 | 1624 - |
| | | | | | | | 1645 |
| | | | | | | 724 | 1624 - |
| | | | | | | | 1645 |
| | | | | | | 725 | 1624 - |
| | | | | | | | 1645 |
| Predicted | TACGGA | NP_001141527 | Zea | 565 | 605 | 726 | 888 - |
| zma | AGAAGA | | mays | | | | 908 |
| mir | GCAAGT | | | | | 727 | 888 - |
| 49435 | TTT/102 | | | | | | 908 |
| | | | | | | 728 | 888 - |
| | | | | | | | 908 |
| | | | | | | 729 | 888 - |
| | | | | | | | 908 |
| | | | | | | 730 | 888 - |
| | | | | | | | 908 |
| | | ACF85023 | Zea | 566 | 606 | 731 | 357 - |
| | | | mays | | | | 377 |
| | | | | | | 732 | 357 - |
| | | | | | | | 377 |
| | | | | | | 733 | 357 - |
| | | | | | | | 377 |
| | | | | | | 734 | 357 - |
| | | | | | | | 377 |
| | | | | | | 735 | 357 - |
| | | | | | | | 377 |
| Predicted | GGCACG | CAI30078 | Sorghum | 564 | 604 | 736 | 845 - |
| siRNA | ACTAAC | | bicolor | | | | 863 |
| 57685 | AGACTC | | | | | 737 | 845 - |
| | ACGGGC/ | | | | | | 863 |
| | 183 | | | | | 738 | 845 - |
| | | | | | | | 863 |
| | | | | | | 739 | 845 - |
| | | | | | | | 863 |
| | | | | | | 740 | 845 - |
| | | | | | | | 863 |
| Predicted | GGACGA | NP_001183648 | Zea | 567 | 607 | 741 | 523 - |
| siRNA | ACCTCTG | | mays | | | | 541 |
| 59993 | GTGTAC | | | | | 742 | 523 - |
| | C/194 | | | | | | 541 |
| | | | | | | 743 | 523 - |
| | | | | | | | 541 |
| | | | | | | 744 | 523 - |
| | | | | | | | 541 |
| | | | | | | 745 | 523 - |
| | | | | | | | 541 |
| | | NP_001140599 | Zea | 550 | 590 | 746 | 414 - |
| | | | mays | | | | 432 |
| | | | | | | 747 | 414 - |
| | | | | | | | 432 |
| | | | | | | 748 | 414 - |
| | | | | | | | 432 |
| | | | | | | 749 | 414 - |
| | | | | | | | 432 |
| | | | | | | 750 | 414 - |
| | | | | | | | 432 |
| | | XP_002454851 | Sorghum | 536 | 576 | 751 | 2501 - |
| | | | bicolor | | | | 2519 |
| | | | | | | 752 | 2501 - |
| | | | | | | | 2519 |
| | | | | | | 753 | 2501 - |
| | | | | | | | 2519 |
| | | | | | | 754 | 2501 - |
| | | | | | | | 2519 |
| | | | | | | 755 | 2501 - |
| | | | | | | | 2519 |
| Predicted | CAAGTT | NP_001149348 | Zea | 571 | 611 | 756 | 1093 - |
| siRNA | ATGCAG | | mays | | | | 1114 |
| 55404 | TTGCTGC | | | | | 757 | 1093 - |
| | CT/167 | | | | | | 1114 |
| | | | | | | 758 | 1093 - |
| | | | | | | | 1114 |
| | | | | | | 759 | 1093 - |
| | | | | | | | 1114 |
| | | | | | | 760 | 1093 - |
| | | | | | | | 1114 |
| | | NP_001137115 | Zea | 570 | 610 | 761 | 1114 - |
| | | | mays | | | | 1135 |
| | | | | | | 762 | 1114 - |
| | | | | | | | 1135 |
| | | | | | | 763 | 1114 - |
| | | | | | | | 1135 |
| | | | | | | 764 | 1114 - |
| | | | | | | | 1135 |
| | | | | | | 765 | 1114 - |
| | | | | | | | 1135 |
| Predicted | AGTTGT | NP_001104926 | Zea | 558 | 598 | 766 | 288 - |
| siRNA | TGGAAG | | mays | | | | 308 |
| 55393 | GGTAGA | | | | | 767 | 288 - |
| | GGACG/166 | | | | | | 308 |
| | | | | | | 768 | 288 - |
| | | | | | | | 308 |
| | | | | | | 769 | 288 - |
| | | | | | | | 308 |
| | | | | | | 770 | 288 - |
| | | | | | | | 308 |
| | | NP_001047230 | Oryza | 557 | 597 | 771 | 288 - |
| | | | sativa | | | | 308 |
| | | | Japonica | | | 772 | 288 - |
| | | | Group | | | | 308 |
| | | | | | | 773 | 288 - |
| | | | | | | | 308 |
| | | | | | | 774 | 288 - |
| | | | | | | | 308 |
| | | | | | | 775 | 288 - |
| | | | | | | | 308 |
| Predicted | TGGAAG | XP_002440246 | Sorghum | 537 | 577 | 776 | 1329 - |
| siRNA | GAGCAT | | bicolor | | | | 1349 |
| 56965 | GCATCTT | | | | | 777 | 1329 - |
| | GAG/178 | | | | | | 1349 |
| | | | | | | 778 | 1329 - |
| | | | | | | | 1349 |
| | | | | | | 779 | 1329 - |
| | | | | | | | 1349 |
| | | | | | | 780 | 1329 - |
| | | | | | | | 1349 |
| | | NP_001130681 | Zea | 556 | 596 | 781 | 1440 - |
| | | | mays | | | | 1460 |
| | | | | | | 782 | 1440 - |
| | | | | | | | 1460 |
| | | | | | | 783 | 1440 - |
| | | | | | | | 1460 |
| | | | | | | 784 | 1440 - |
| | | | | | | | 1460 |
| | | | | | | 785 | 1440 - |
| | | | | | | | 1460 |
| | | XP_002458292 | Sorghum | 538 | 578 | 786 | 1549 - |
| | | | bicolor | | | | 1569 |
| | | | | | | 787 | 1549 - |
| | | | | | | | 1569 |
| | | | | | | 788 | 1549 - |
| | | | | | | | 1569 |
| | | | | | | 789 | 1549 - |
| | | | | | | | 1569 |
| | | | | | | 790 | 1549 - |
| | | | | | | | 1569 |
| | | XP_002452577 | Sorghum | 561 | 601 | 791 | 770 - |
| | | | bicolor | | | | 790 |
| | | | | | | 792 | 770 - |
| | | | | | | | 790 |
| | | | | | | 793 | 770 - |
| | | | | | | | 790 |
| | | | | | | 794 | 770 - |
| | | | | | | | 790 |
| | | | | | | 795 | 770 - |
| | | | | | | | 790 |
| | | ACN34324 | Zea | 555 | 595 | 796 | 1445 - |
| | | | mays | | | | 1465 |
| | | | | | | 797 | 1445 - |
| | | | | | | | 1465 |
| | | | | | | 798 | 1445 - |
| | | | | | | | 1465 |
| | | | | | | 799 | 1445 - |
| | | | | | | | 1465 |
| | | | | | | 800 | 1445 - |
| | | | | | | | 1465 |
| Predicted | ACGACG | XP_002447337 | Sorghum | 573 | 613 | 801 | 120 - |
| siRNA | AGGACT | | bicolor | | | | 138 |
| 58721 | TCGAGA | | | | | 802 | 120 - |
| | CG/186 | | | | | | 138 |
| | | | | | | 803 | 120 - |
| | | | | | | | 138 |
| | | | | | | 804 | 120 - |
| | | | | | | | 138 |
| | | | | | | 805 | 120 - |
| | | | | | | | 138 |
| | | NP_001183362 | Zea | 554 | 594 | 806 | 435 - |
| | | | mays | | | | 453 |
| | | | | | | 807 | 435 - |
| | | | | | | | 453 |
| | | | | | | 808 | 435 - |
| | | | | | | | 453 |
| | | | | | | 809 | 435 - |
| | | | | | | | 453 |
| | | | | | | 810 | 435 - |
| | | | | | | | 453 |
| Predicted | AGCAGA | XP_002447941 | Sorghum | 574 | 614 | 811 | 503 - |
| siRNA | ATGGAG | | bicolor | | | | 526 |
| 57179 | GAAGAG | | | | | 812 | 503 - |
| | ATGG/180 | | | | | | 526 |
| | | | | | | 813 | 503 - |
| | | | | | | | 526 |
| | | | | | | 814 | 503 - |
| | | | | | | | 526 |
| | | | | | | 815 | 503 - |
| | | | | | | | 526 |

[0247] Table 13. Provided are miRNA-Resistant Target Examples for Selected miRNAs of the Invention.

TABLE 14
Target Mimic Examples for Selected miRNAs of the Invention

| Mir | | Bulge Reverse Complement miR/SEQ |
|---|---|---|
| name | Mir sequence/SEQ ID NO: | ID NO: |
| aqc- | AGAAGAGAGAGAGCACAACCC/ | GGGTTGTGCTCCTATCTCTCTTCT/ |
| miR529 | 58 | 822 |
| ath- | CTTGAGAGAGAGAACACAGAC | CGTCTGTGTTCTCTACTCTCTCAAG/ |
| miR2936 | G/59 | 823 |
| mtr- | TGAGCCAGGATGACTTGCCGG/ | CCGGCAAGTCACTATCCTGGCTCA/ |
| miR169q | 61 | 824 |
| mtr- | ATTCACGGGGACGAACCTCCT/ | AGGAGGTTCGTCTACCCCGTGAAT/ |
| miR2647a | 816 | 825 |
| mtr- | ATGAAGTGTTTGGGGGAACTC/ | GAGTTCCCCCACTAAACACTTCAT/ |
| miR395c | 62 | 826 |
| osa- | TGGTGAGCCTTCCTGGCTAAG/4 | CTTAGCCAGGACTAAGGCTCACCA/ |
| miR1430 | | 827 |
| osa- | TCACGGAAAACGAGGGAGCAG | TGGCTGCTCCCTCGCTATTTTCCGT |
| miR1868 | CCA/5 | GA/828 |
| osa- | CCTGAGGGGAAATCGGCGGGA/ | TCCCGCCGATTCTATCCCCTCAGG/ |
| miR2096- | 6 | 829 |
| 3p | | |
| osa- | GTGAAGTGTTTGGGGGAACTC/ | GAGTTCCCCCACTAAACACTTCAC/ |
| miR395m | 63 | 830 |
| peu- | GGCCGGGGGACGGGCTGGGA/ | TCCCAGCCCGCTATCCCCCGGCC/ |
| miR2911 | 64 | 831 |
| Predicted | AAAAAAGACTGAGCCGAATTG | TTTCAATTCGGCTCCTAAGTCTTTT |
| folded | AAA/65 | TT/832 |
| 24-nts- | | |
| long seq | | |
| 50703 | | |
| Predicted | AACTAAAACGAAACGGAAGGA | TACTCCTTCCGTTTCTACGTTTTAG |
| folded | GTA/8 | TT/833 |
| 24-nts- | | |
| long seq | | |
| 50935 | | |
| Predicted | AAGGAGTTTAATGAAGAAAGA | CTCTCTTTCTTCATCTATAAACTCC |
| folded | GAG/66 | TT/834 |
| 24-nts- | | |
| long seq | | |
| 51022 | | |
| Predicted | AAGGTGCTTTTAGGAGTAGGA | CCGTCCTACTCCTACTAAAAGCAC |
| folded | CGG/9 | CTT/835 |
| 24-nts- | | |
| long seq | | |
| 51052 | | |
| Predicted | ACAAAGGAATTAGAACGGAAT | GCCATTCCGTTCTACTAATTCCTTT |
| folded | GGC/10 | GT/836 |
| 24-nts- | | |
| long seq | | |
| 51215 | | |
| Predicted | ACTGATGACGACACTGAGGAG | AGCCTCCTCAGTGTCTACGTCATC |
| folded | GCT/67 | AGT/837 |
| 24-nts- | | |
| long seq | | |
| 51381 | | |
| Predicted | AGAATCAGGAATGGAACGGCT | CGGAGCCGTTCCATCTATCCTGAT |
| folded | CCG/11 | TCT/838 |
| 24-nts- | | |
| long seq | | |
| 51468 | | |
| Predicted | AGAATCAGGGATGGAACGGCT | TAGAGCCGTTCCATCTACCCTGAT |
| folded | CTA/12 | TCT/839 |
| 24-nts- | | |
| long seq | | |
| 51469 | | |
| Predicted | AGAGGAACCAGAGCCGAAGCC | AACGGCTTCGGCTCCTATGGTTCC |
| folded | GTT/68 | TCT/840 |
| 24-nts- | | |
| long seq | | |
| 51542 | | |
| Predicted | AGAGTCACGGGCGAGAAGAGG | CGTCCTCTTCTCGCCTACCGTGACT |
| folded | ACG/13 | CT/841 |
| 24-nts- | | |
| long seq | | |
| 51577 | | |
| Predicted | AGGACCTAGATGAGCGGGCGG | AAACCGCCCGCTCACTATCTAGGT |
| folded | TTT/14 | CCT/842 |
| 24-nts- | | |
| long seq | | |
| 51691 | | |
| Predicted | AGGACGCTGCTGGAGACGGAG | ATTCTCCGTCTCCACTAGCAGCGT |
| folded | AAT/15 | CCT/843 |
| 24-nts- | | |
| long seq | | |
| 51695 | | |
| Predicted | AGGCAAGGTGGAGGACGTTGA | TCATCAACGTCCTCCTACACCTTG |
| folded | TGA/69 | CCT/844 |
| 24-nts- | | |
| long seq | | |
| 51757 | | |
| Predicted | AGGGCTGATTTGGTGACAAGG | TCCCCTTGTCACCACTAAATCAGC |
| folded | GGA/70 | CCT/845 |
| 24-nts- | | |
| long seq | | |
| 51802 | | |
| Predicted | AGGGCTTGTTCGGTTTGAAGGG | ACCCCTTCAAACCGCTAAACAAGC |
| folded | GT/16 | CCT/846 |
| 24-nts- | | |
| long seq | | |
| 51814 | | |
| Predicted | ATATAAAGGGAGGAGGTATGG | GGTCCATACCTCCTCTACCCTTTAT |
| folded | ACC/71 | AT/847 |
| 24-nts- | | |
| long seq | | |
| 51966 | | |
| Predicted | ATCGGTCAGCTGGAGGAGACA | ACCTGTCTCCTCCACTAGCTGACC |
| folded | GGT/72 | GAT/848 |
| 24-nts- | | |
| long seq | | |
| 52041 | | |
| Predicted | ATCTTTCAACGGCTGCGAAGA | CCTTCTTCGCAGCCCTAGTTGAAA |
| folded | AGG/17 | GAT/849 |
| 24-nts- | | |
| long seq | | |
| 52057 | | |
| Predicted | ATGGTAAGAGACTATGATCCA | AGTTGGATCATAGTCTACTCTTAC |
| folded | ACT/73 | CAT/850 |
| 24-nts- | | |
| long seq | | |
| 52109 | | |
| Predicted | CAATTTTGTACTGGATCGGGGC | ATGCCCCGATCCAGCTATACAAAA |
| folded | AT/74 | TTG/851 |
| 24-nts- | | |
| long seq | | |
| 52212 | | |
| Predicted | CAGAGGAACCAGAGCCGAAGC | ACGGCTTCGGCTCTCTAGGTTCCT |
| folded | CGT/75 | CTG/852 |
| 24-nts- | | |
| long seq | | |
| 52218 | | |
| Predicted | CGGCTGGACAGGGAAGAAGAG | GTGCTCTTCTTCCCCTATGTCCAGC |
| folded | CAC/76 | CG/853 |
| 24-nts- | | |
| long seq | | |
| 52299 | | |
| Predicted | CTAGAATTAGGGATGGAACGG | GAGCCGTTCCATCCCTACTAATTC |
| folded | CTC/18 | TAG/854 |
| 24-nts- | | |
| long seq | | |
| 52327 | | |
| Predicted | GAAACTTGGAGAGATGGAGGC | AAAGCCTCCATCTCCTATCCAAGT |
| folded | TTT/77 | TTC/855 |
| 24-nts- | | |
| long seq | | |
| 52347 | | |
| Predicted | GAGAGAGAAGGGAGCGGATCT | ACCAGATCCGCTCCCTACTTCTCTC |
| folded | GGT/78 | TC/856 |
| 24-nts- | | |
| long seq | | |
| 52452 | | |
| Predicted | GAGGGATAACTGGGGACAACA | CCGTGTTGTCCCCACTAGTTATCCC |
| folded | CGG/19 | TC/857 |
| 24-nts- | | |
| long seq | | |
| 52499 | | |
| Predicted | GCGGAGTGGGATGGGGAGTGT | GCAACACTCCCCATCTACCCACTC |
| folded | TGC/20 | CGC/858 |
| 24-nts- | | |
| long seq | | |
| 52633 | | |
| Predicted | GCTGCACGGGATTGGTGGAGA | ACCTCTCCACCAATCTACCCGTGC |
| folded | GGT/79 | AGC/859 |
| 24-nts- | | |
| long seq | | |
| 52648 | | |
| Predicted | GGAGACGGATGCGGAGACTGC | CCAGCAGTCTCCGCCTAATCCGTC |
| folded | TGG/21 | TCC/860 |
| 24-nts- | | |
| long seq | | |
| 52688 | | |
| Predicted | GGCTGCTGGAGAGCGTAGAGG | GGTCCTCTACGCTCCTATCCAGCA |
| folded | ACC/80 | GCC/861 |
| 24-nts- | | |
| long seq | | |
| 52739 | | |
| Predicted | GGGTTTTGAGAGCGAGTGAAG | CCCCTTCACTCGCTCTACTCAAAA |
| folded | GGG/81 | CCC/862 |
| 24-nts- | | |
| long seq | | |
| 52792 | | |
| Predicted | GGTATTGGGGTGGATTGAGGT | TCCACCTCAATCCACTACCCCAAT |
| folded | GGA/82 | ACC/863 |
| 24-nts- | | |
| long seq | | |
| 52795 | | |
| Predicted | GGTGGCGATGCAAGAGGAGCT | TTGAGCTCCTCTTGCTACATCGCC |
| folded | CAA/83 | ACC/864 |
| 24-nts- | | |
| long seq | | |
| 52801 | | |
| Predicted | GGTTAGGAGTGGATTGAGGGG | ATCCCCCTCAATCCCTAACTCCTA |
| folded | GAT/22 | ACC/865 |
| 24-nts- | | |
| long seq | | |
| 52805 | | |
| Predicted | GTCAAGTGACTAAGAGCATGT | ACCACATGCTCTTACTAGTCACTT |
| folded | GGT/3 | GAC/866 |
| 24-nts- | | |
| long seq | | |
| 52850 | | |
| Predicted | GTGGAATGGAGGAGATTGAGG | TCCCCTCAATCTCCCTATCCATTCC |
| folded | GGA/24 | AC/867 |
| 24-nts- | | |
| long seq | | |
| 52882 | | |
| Predicted | GTTGCTGGAGAGAGTAGAGGA | ACGTCCTCTACTCTCTACTCCAGC |
| folded | CGT/84 | AAC/868 |
| 24-nts- | | |
| long seq | | |
| 52955 | | |
| Predicted | TGGCTGAAGGCAGAACCAGGG | CTCCCCTGGTTCTGCTACCTTCAGC |
| folded | GAG/25 | CA/869 |
| 24-nts- | | |
| long seq | | |
| 53118 | | |
| Predicted | TGTGGTAGAGAGGAAGAACAG | GTCCTGTTCTTCCTCTACTCTACCA |
| folded | GAC/26 | CA/870 |
| 24-nts- | | |
| long seq | | |
| 53149 | | |
| Predicted | AGGGACTCTCTTTATTTCCGAC | CCGTCGGAAATAAACTAGAGAGTC |
| folded | GG/27 | CCT/871 |
| 24-nts- | | |
| long seq | | |
| 53594 | | |
| Predicted | AGGGTTCGTTTCCTGGGAGCGC | CCGCGCTCCCAGGACTAAACGAAC |
| folded | GG/28 | CCT/872 |
| 24-nts- | | |
| long seq | | |
| 53604 | | |
| Predicted | TCCTAGAATCAGGGATGGAAC | GCCGTTCCATCCCTCTAGATTCTA |
| folded | GGC/29 | GGA/873 |
| 24-nts- | | |
| long seq | | |
| 54081 | | |
| Predicted | TGGGAGCTCTCTGTTCGATGGC | GCGCCATCGAACAGCTAAGAGCTC |
| folded | GC/30 | CCA/874 |
| 24-nts- | | |
| long seq | | |
| 54132 | | |
| Predicted | AAGACGAAGGTAGCAGCGCGA | ATATCGCGCTGCTACTACCTTCGT |
| siRNA | TAT/163 | CTT/875 |
| 54240 | | |
| Predicted | AAGAAACGGGGCAGTGAGATG | GTCCATCTCACTGCCTACCCGTTTC |
| siRNA | GAC/119 | TT/876 |
| 54339 | | |
| Predicted | AGAAAAGATTGAGCCGAATTG | AATTCAATTCGGCTCCTAAATCTTT |
| siRNA | AATT/120 | TCT/877 |
| 54631 | | |
| Predicted | AGCCAGACTGATGAGAGAAGG | CCTCCTTCTCTCATCTACAGTCTGG |
| siRNA | AGG/164 | CT/878 |
| 54957 | | |
| Predicted | AGAGCCTGTAGCTAATGGTGG | CCCACCATTAGCCTATACAGGCTC |
| siRNA | G/121 | T/879 |
| 54991 | | |
| Predicted | ACGTTGTTGGAAGGGTAGAGG | CGTCCTCTACCCTTCTACCAACAA |
| siRNA | ACG/165 | CGT/880 |
| 55081 | | |
| Predicted | AGGTAGCGGCCTAAGAACGAC | TGTGTCGTTCTTAGCTAGCCGCTA |
| siRNA | ACA/122 | CCT/881 |
| 55111 | | |
| Predicted | CAAGTTATGCAGTTGCTGCCT/ | AGGCAGCAACTCTAGCATAACTTG/ |
| siRNA | 166 | 882 |
| 55393 | | |
| Predicted | CAGAATGGAGGAAGAGATGGT | CACCATCTCTTCCTACTCCATTCTG/ |
| siRNA | G/167 | 883 |
| 55404 | | |
| Predicted | CATGTGTTCTCAGGTCGCCCC/ | GGGGCGACCTGCTAAGAACACAT |
| siRNA | 200 | G/884 |
| 55413 | | |
| Predicted | CCTATATACTGGAACGGAACG | AGCCGTTCCGTTCCCTAAGTATAT |
| siRNA | GCT/123 | AGG/885 |
| 55423 | | |
| Predicted | ATCTGTGGAGAGAGAAGGTTG | GGGCAACCTTCTCTCTACTCCACA |
| siRNA | CCC/168 | GAT/886 |
| 55472 | | |
| Predicted | ATGTCAGGGGGCCATGCAGTA | ATACTGCATGGCCTACCCCTGACA |
| siRNA | T/169 | T/887 |
| 55720 | | |
| Predicted | ATCCTGACTGTGCCGGGCCGGC | GGGCCGGCCCGGCACTACAGTCAG |
| siRNA | CC/170 | GAT/888 |
| 55732 | | |
| Predicted | CTATATACTGGAACGGAACGG | AAGCCGTTCCGTTCCTACAGTATA |
| siRNA | CTT/124 | TAG/889 |
| 55806 | | |
| Predicted | CGAGTTCGCCGTAGAGAAAGC | AGCTTTCTCTACCTAGGCGAACTC |
| siRNA | T/171 | G/890 |
| 56034 | | |
| Predicted | GACGAGATCGAGTCTGGAGCG | GCTCGCTCCAGACTCTACGATCTC |
| siRNA | AGC/125 | GTC/891 |
| 56052 | | |
| Predicted | GAGTATGGGGAGGGACTAGGG | TCCCTAGTCCCTCTACCCCATACTC/ |
| siRNA | A/126 | 892 |
| 56106 | | |
| Predicted | GACTGATTCGGACGAAGGAGG | AACCCTCCTTCGTCCTACGAATCA |
| siRNA | GTT/172 | GTC/893 |
| 56162 | | |
| Predicted | GTCTGAACACTAAACGAAGCA | TGTGCTTCGTTTACTAGTGTTCAGA |
| siRNA | CA/173 | C/894 |
| 56205 | | |
| Predicted | GACGTTGTTGGAAGGGTAGAG | GTCCTCTACCCTTCCTACAACAAC |
| siRNA | GAC/174 | GTC/895 |
| 56277 | | |
| Predicted | GCTACTGTAGTTCACGGGCCGG | GGCCGGCCCGTGAACTACTACAGT |
| siRNA | CC/175 | AGC/896 |
| 56307 | | |
| Predicted | GACGAAATAGAGGCTCAGGAG | CCTCTCCTGAGCCTCTACTATTTCG |
| siRNA | AGG/127 | TC/897 |
| 56353 | | |
| Predicted | GGATTCGTGATTGGCGATGGG | CCCCATCGCCAACTATCACGAATC |
| siRNA | G/128 | C/898 |
| 56388 | | |
| Predicted | GGTGAGAAACGGAAAGGCAGG | TGTCCTGCCTTTCCCTAGTTTCTCA |
| siRNA | ACA/129 | CC/899 |
| 56406 | | |
| Predicted | GGTATTCGTGAGCCTGTTTCTG | AACCAGAAACAGGCTCTACACGA |
| siRNA | GTT/176 | ATACC/900 |
| 56425 | | |
| Predicted | GTGTCTGAGCAGGGTGAGAAG | AGCCTTCTCACCCTCTAGCTCAGA |
| siRNA | GCT/130 | CAC/901 |
| 56443 | | |
| Predicted | GTTTTGGAGGCGTAGGCGAGG | ATCCCTCGCCTACGCTACCTCCAA |
| siRNA | GAT/131 | AAC/902 |
| 56450 | | |
| Predicted | TGGGACGCTGCATCTGTTGAT/ | ATCAACAGATGCTACAGCGTCCCA/ |
| siRNA | 132 | 903 |
| 56542 | | |
| Predicted | TCTATATACTGGAACGGAACG | AGCCGTTCCGTTCCCTAAGTATAT |
| siRNA | GCT/133 | AGA/904 |
| 56706 | | |
| Predicted | TGGAAGGAGCATGCATCTTGA | CTCAAGATGCATCTAGCTCCTTCC |
| siRNA | G/177 | A/905 |
| 56837 | | |
| Predicted | GTTGTTGGAGGGGTAGAGGAC | GACGTCCTCTACCCCTACTCCAAC |
| siRNA | GTC/134 | AAC/906 |
| 56856 | | |
| Predicted | TTCTTGACCTTGTAAGACCCA/ | TGGGTCTTACACTAAGGTCAAGAA/ |
| siRNA | 178 | 907 |
| 56965 | | |
| Predicted | AATGACAGGACGGGATGGGAC | CCCGTCCCATCCCGCTATCCTGTC |
| siRNA | GGG/135 | ATT/908 |
| 57034 | | |
| Predicted | ACGGAACGGCTTCATACCACA | TATTGTGGTATGAACTAGCCGTTC |
| siRNA | ATA/136 | CGT/909 |
| 57054 | | |
| Predicted | AGCAGAATGGAGGAAGAGATG | CCATCTCTTCCTCTACCATTCTGCT/ |
| siRNA | G/179 | 910 |
| 57088 | | |
| Predicted | CTGGACACTGTTGCAGAAGGA | TCCTCCTTCTGCAACTACAGTGTCC |
| siRNA | GGA/180 | AG/911 |
| 57179 | | |
| Predicted | GAAATAGGATAGGAGGAGGGA | TCATCCCTCCTCCTCTAATCCTATT |
| siRNA | TGA/181 | TC/912 |
| 57181 | | |
| Predicted | GACGGGCCGACATTTAGAGCA | CCGTGCTCTAAATGCTATCGGCCC |
| siRNA | CGG/137 | GTC/913 |
| 57193 | | |
| Predicted | GGCACGACTAACAGACTCACG | GCCCGTGAGTCTGTCTATAGTCGT |
| siRNA | GGC/182 | GCC/914 |
| 57228 | | |
| Predicted | AATCCCGGTGGAACCTCCA/183 | TGGAGGTTCCTACACCGGGATT/915 |
| siRNA | | |
| 57685 | | |
| Predicted | ACACGACAAGACGAATGAGAG | TCTCTCTCATTCGTCTACTTGTCGT |
| siRNA | AGA/184 | GT/916 |
| 57772 | | |
| Predicted | ACGACGAGGACTTCGAGACG/ | CGTCTCGAAGCTATCCTCGTCGT/917 |
| siRNA | 185 | |
| 57863 | | |
| Predicted | ACGGATAAAAGGTACTCT/138 | AGAGTACCCTATTTTATCCGT/918 |
| siRNA | | |
| 57884 | | |
| Predicted | AGTATGTCGAAAACTGGAGGG | GCCCTCCAGTTTCTATCGACATAC |
| siRNA | C/139 | T/919 |
| 58292 | | |
| Predicted | ATAAGCACCGGCTAACTCT/140 | AGAGTTAGCCTACGGTGCTTAT/920 |
| siRNA | | |
| 58362 | | |
| Predicted | ATTCAGCGGGCGTGGTTATTGG | TGCCAATAACCACGCTACCCGCTG |
| siRNA | CA/141 | AAT/921 |
| 58665 | | |
| Predicted | CAAAGTGGTCGTGCCGGAG/186 | CTCCGGCACCTAGACCACTTTG/922 |
| siRNA | | |
| 58721 | | |
| Predicted | CAGCGGGTGCCATAGTCGAT/ | ATCGACTATGCTAGCACCCGCTG/923 |
| siRNA | 142 | |
| 58872 | | |
| Predicted | CAGCTTGAGAATCGGGCCGC/ | GCGGCCCGATCTATCTCAAGCTG/924 |
| siRNA | 187 | |
| 58877 | | |
| Predicted | TTTGCGACACGGGCTGCTCT/ | AGAGCAGCCCCTAGTGTCGCAAA/ |
| siRNA | 161 | 925 |
| 58924 | | |
| Predicted | CATTGCGACGGTCCTCAA/143 | TTGAGGACCTACGTCGCAATG/926 |
| siRNA | | |
| 58940 | | |
| Predicted | CCCTGTGACAAGAGGAGGA/ | TCCTCCTCTCTATGTCACAGGG/927 |
| siRNA | 188 | |
| 59032 | | |
| Predicted | CCTGCTAACTAGTTATGCGGAG | GCTCCGCATAACTCTAAGTTAGCA |
| siRNA | C/189 | GG/928 |
| 59102 | | |
| Predicted | CGAACTCAGAAGTGAAACC/190 | GGTTTCACTCTATCTGAGTTCG/929 |
| siRNA | | |
| 59123 | | |
| Predicted | CGCTTCGTCAAGGAGAAGGGC/ | GCCCTTCTCCTCTATGACGAAGCG/ |
| siRNA | 191 | 930 |
| 59235 | | |
| Predicted | CTCAACGGATAAAAGGTAC/144 | GTACCTTTTCTAATCCGTTGAG/931 |
| siRNA | | |
| 59380 | | |
| Predicted | CTTAACTGGGCGTTAAGTTGCA | ACCCTGCAACTTAACGCTACCCAG |
| siRNA | GGGT/192 | TTAAG/932 |
| 59485 | | |
| Predicted | GACAGTCAGGATGTTGGCT/145 | AGCCAACATCTACCTGACTGTC/933 |
| siRNA | | |
| 59626 | | |
| Predicted | GACTGATCCTTCGGTGTCGGCG/ | CGCCGACACCGACTAAGGATCAGT |
| siRNA | 146 | C/934 |
| 59659 | | |
| Predicted | GCCGAAGATTAAAAGACGAGA | TCGTCTCGTCTTTTCTAAATCTTCG |
| siRNA | CGA/147 | GC/935 |
| 59846 | | |
| Predicted | GCCTTTGCCGACCATCCTGA/ | TCAGGATGGTCTACGGCAAAGGC/ |
| siRNA | 148 | 936 |
| 59867 | | |
| Predicted | GGAATCGCTAGTAATCGTGGA | ATCCACGATTACCTATAGCGATTC |
| siRNA | T/149 | C/937 |
| 59952 | | |
| Predicted | GGACGAACCTCTGGTGTACC/ | GGTACACCAGCTAAGGTTCGTCC/938 |
| siRNA | 193 | |
| 59954 | | |
| Predicted | GGAGCAGCTCTGGTCGTGGG/ | CCCACGACCACTAGAGCTGCTCC/939 |
| siRNA | 150 | |
| 59961 | | |
| Predicted | GGAGGCTCGACTATGTTCAAA/ | TTTGAACATAGCTATCGAGCCTCC/ |
| siRNA | 151 | 940 |
| 59965 | | |
| Predicted | GGAGGGATGTGAGAACATGGG | GCCCATGTTCTCCTAACATCCCTCC/ |
| siRNA | C/152 | 941 |
| 59966 | | |
| Predicted | GGCGCTGGAGAACTGAGGG/ | CCCTCAGTTCTACTCCAGCGCC/942 |
| siRNA | 194 | |
| 59993 | | |
| Predicted | GGGGGCCTAAATAAAGACT/195 | AGTCTTTATCTATTAGGCCCCC/943 |
| siRNA | | |
| 60012 | | |
| Predicted | GTCCCCTTCGTCTAGAGGC/153 | GCCTCTAGACTACGAAGGGGAC/944 |
| siRNA | | |
| 60081 | | |
| Predicted | GTCTGAGTGGTGTAGTTGGT/ | ACCAACTACACTACCACTCAGAC/945 |
| siRNA | 154 | |
| 60095 | | |
| Predicted | GTGCTAACGTCCGTCGTGAA/ | TTCACGACGGCTAACGTTAGCAC/946 |
| siRNA | 196 | |
| 60123 | | |
| Predicted | GTTGGTAGAGCAGTTGGC/155 | GCCAACTGCTACTCTACCAAC/947 |
| siRNA | | |
| 60188 | | |
| Predicted | TACGTTCCCGGGTCTTGTACA/ | TGTACAAGACCCTACGGGAACGTA/ |
| siRNA | 156 | 948 |
| 60285 | | |
| Predicted | TAGCTTAACCTTCGGGAGGG/ | CCCTCCCGAACTAGGTTAAGCTA/949 |
| siRNA | 197 | |
| 60334 | | |
| Predicted | TATGGATGAAGATGGGGGTG/ | CACCCCCATCCTATTCATCCATA/950 |
| siRNA | 157 | |
| 60387 | | |
| Predicted | TCAACGGATAAAAGGTACTCC | CGGAGTACCTTTCTATATCCGTTG |
| siRNA | G/158 | A/951 |
| 60434 | | |
| Predicted | TGAGAAAGAAAGAGAAGGCTC | TGAGCCTTCTCTCTATTCTTTCTCA/ |
| siRNA | A/198 | 952 |
| 60750 | | |
| Predicted | TGATGTCCTTAGATGTTCTGGG | GCCCAGAACATCTCTAAAGGACAT |
| siRNA | C/199 | CA/953 |
| 60803 | | |
| Predicted | TGCCCAGTGCTTTGAATG/159 | CATTCAAACTAGCACTGGGCA/954 |
| siRNA | | |
| 60837 | | |
| Predicted | TGCGAGACCGACAAGTCGAGC/ | GCTCGACTTGTCTACGGTCTCGCA/ |
| siRNA | 160 | 955 |
| 60850 | | |
| Predicted | TTTGCGACACGGGCTGCTCT/ | AGAGCAGCCCCTAGTGTCGCAAA/ |
| siRNA | 161 | 956 |
| 61382 | | |
| Predicted | AAAAGAGAAACCGAAGACACA | ATGTGTCTTCGGCTATTTCTCTTTT/ |
| zma mir | T/85 | 957 |
| 47944 | | |
| Predicted | AAAGAGGATGAGGAGTAGCAT | CATGCTACTCCTCTACATCCTCTTT/ |
| zma mir | G/86 | 958 |
| 47976 | | |
| Predicted | AACGTCGTGTCGTGCTTGGGCT/ | AGCCCAAGCACGCTAACACGACGT |
| zma mir | 31 | T/959 |
| 48061 | | |
| Predicted | AATACACATGGGTTGAGGAGG/ | CCTCCTCAACCCTACATGTGTATT/ |
| zma mir | 87 | 960 |
| 48185 | | |
| Predicted | CACTGGACCAATACATGAGAT | AATCTCATGTATCTATGGTCCAGG |
| zma mir | T/32 | T/961 |
| 48295 | | |
| Predicted | AGAAGCGACAATGGGACGGAG | ACTCCGTCCCATCTATGTCGCTTCT/ |
| zma mir | T/33 | 962 |
| 48350 | | |
| Predicted | AGAAGCGGACTGCCAAGGAGG | GCCTCCTTGGCACTAGTCCGCTTCT/ |
| zma mir | C/88 | 963 |
| 48351 | | |
| Predicted | AGAGGGTTTGGGGATAGAGGG | GTCCCTCTATCCCCTACAAACCCT |
| zma mir | AC/89 | CT/964 |
| 48397 | | |
| Predicted | AGGAAGGAACAAACGAGGATA | CTTATCCTCGTTTCTAGTTCCTTCC |
| zma mir | AG/34 | T/965 |
| 48457 | | |
| Predicted | AGGATGCTGACGCAATGGGAT/ | ATCCCATTGCGCTATCAGCATCCT/ |
| zma mir | 2 | 966 |
| 48486 | | |
| Predicted | AGGATGTGAGGCTATTGGGGA | GTCCCCAATAGCCTACTCACATCC |
| zma mir | C/60 | T/967 |
| 48492 | | |
| Predicted | TAAGGGATGAGGCAGAGCATG/ | CATGCTCTGCCCTATCATCCCTAT/ |
| zma mir | 90 | 968 |
| 48588 | | |
| Predicted | TAGCTATTTGTACCCGTCACCG/ | CGGTGACGGGTACTACAAATAGCA |
| zma mir | 91 | T/969 |
| 48669 | | |
| Predicted | ATGTGGATAAAAGGAGGGATG | TCATCCCTCCTTCTATTATCCACAT/ |
| zma mir | A/92 | 970 |
| 48708 | | |
| Predicted | CAACAGGAACAAGGAGGACCA | ATGGTCCTCCTTCTAGTTCCTGTTG/ |
| zma mir | T/93 | 971 |
| 48771 | | |
| Predicted | CCAAGAGATGGAAGGGCAGAG | GCTCTGCCCTTCCTACATCTCTTGG/ |
| zma mir | C/35 | 972 |
| 48877 | | |
| Predicted | CCAAGTCGAGGGCAGACCAGG | GCCTGGTCTGCCCTACTCGACTTG |
| zma mir | C/1 | G/973 |
| 48879 | | |
| Predicted | CGACAACGGGACGGAGTTCAA/ | TTGAACTCCGTCTACCCGTTGTCG/ |
| zma mir | 36 | 974 |
| 48922 | | |
| Predicted | TCGAGTTGAGAAAGAGATGCT/ | AGCATCTCTTTCTACTCAACTCAG/ |
| zma mir | 94 | 975 |
| 49002 | | |
| Predicted | TCGATGGGAGGTGGAGTTGCA | ATGCAACTCCACCTACTCCCATCA |
| zma mir | T/95 | G/976 |
| 49003 | | |
| Predicted | CTGGGAAGATGGAACATTTTG | ACCAAAATGTTCCCTAATCTTCCC |
| zma mir | GT/96 | AG/977 |
| 49011 | | |
| Predicted | GAAGATATACGATGATGAGGA | CTCCTCATCATCCTAGTATATCTTC/ |
| zma mir | G/97 | 978 |
| 49053 | | |
| Predicted | GAATCTATCGTTTGGGCTCAT/ | ATGAGCCCAAACTACGATAGATTC/ |
| zma mir | 98 | 979 |
| 49070 | | |
| Predicted | AGCGAGCTACAAAAGGATTCG/ | CGAATCCTTTTCTAGTAGCTCGTC/ |
| zma mir | 99 | 980 |
| 49082 | | |
| Predicted | GAGGATGGAGAGGTACGTCAG | TCTGACGTACCTCTACTCCATCCTC/ |
| zma mir | A/37 | 981 |
| 49123 | | |
| Predicted | AGTGACGAGGAGTGAGAGTAG | CCTACTCTCACTCTACCTCGTCATC/ |
| zma mir | G/100 | 982 |
| 49155 | | |
| Predicted | AGTGGGTAGGAGAGCGTCGTG | CACACGACGCTCTCTACCTACCCA |
| zma mir | TG/38 | TC/983 |
| 49161 | | |
| Predicted | AGTGGTTCATAGGTGACGGTA | CTACCGTCACCTCTAATGAACCAT |
| zma mir | G/39 | C/984 |
| 49162 | | |
| Predicted | GGGAGCCGAGACATAGAGATG | ACATCTCTATGTCTACTCGGCTCCC |
| zma mir | T/40 | /985 |
| 49262 | | |
| Predicted | GGGCATCTTCTGGCAGGAGGA | TGTCCTCCTGCCACTAGAAGATGC |
| zma mir | CA/101 | CC/986 |
| 49269 | | |
| Predicted | TGGAGGAGTGATAATGAGACG | CCGTCTCATTATCTACACTCCTCAC/ |
| zma mir | G/41 | 987 |
| 49323 | | |
| Predicted | TGTTGGGGCTTTAGCAGGTTTA | ATAAACCTGCTAACTAAGCCCCAA |
| zma mir | T/42 | AC/988 |
| 49369 | | |
| Predicted | ATCGGAAGAAGAGCAAGTTTT/ | AAAACTTGCTCCTATTCTTCCGTA/ |
| zma mir | 102 | 989 |
| 49435 | | |
| Predicted | TAGAAAGAGCGAGAGAACAAA | CTTTGTTCTCTCCTAGCTCTTTCTA/ |
| zma mir | G/103 | 990 |
| 49445 | | |
| Predicted | CTCATAGCTGGGCGGAAGAGA | ATCTCTTCCGCCCTACAGCTATGG |
| zma mir | T/43 | A/991 |
| 49609 | | |
| Predicted | TCGGCATGTGTAGGATAGGTG/ | CACCTATCCTACTACACATGCCGA/ |
| zma mir | 44 | 992 |
| 49638 | | |
| Predicted | TGATAGGCTGGGTGTGGAAGC | CGCTTCCACACCCTACAGCCTATC |
| zma mir | G/45 | A/993 |
| 49761 | | |
| Predicted | TGATATTATGGACGACTGGTT/ | AACCAGTCGTCCTACATAATATCA/ |
| zma mir | 104 | 994 |
| 49762 | | |
| Predicted | GTCAAACAGACTGGGGAGGCG | TCGCCTCCCCAGCTATCTGTTTGCA/ |
| zma mir | A/46 | 995 |
| 49787 | | |
| Predicted | TGGAAGGGCCATGCCGAGGAG/ | CTCCTCGGCATCTAGGCCCTTCCA/ |
| zma mir | 105 | 996 |
| 49816 | | |
| Predicted | TTGAGCGCAGCGTTGATGAGC/ | GCTCATCAACGCTACTGCGCTCAA/ |
| zma mir | 106 | 997 |
| 49985 | | |
| Predicted | TTGGATAACGGGTAGTTTGGA | ACTCCAAACTACCCTACGTTATCC |
| zma mir | GT/107 | AA/998 |
| 50021 | | |
| Predicted | TTTGGCTGACAGGATAAGGGA | CTCCCTTATCCTCTAGTCAGCCAA |
| zma mir | G/47 | A/999 |
| 50077 | | |
| Predicted | TTTTCATAGCTGGGCGGAAGA | CTCTTCCGCCCACTAGCTATGAAA |
| zma mir | G/48 | A/1000 |
| 50095 | | |
| Predicted | AACTTTAAATAGGTAGGACGG | GCGCCGTCCTACCTCTAATTTAAA |
| zma mir | CGC/49 | GTT/1001 |
| 50110 | | |
| Predicted | GACTGCCGACTCATTCACCCA/ | TGGGTGAATGACTAGTCGGCAGCT/ |
| zma mir | 108 | /1002 |
| 50144 | | |
| Predicted | GGAATGTTGTCTGGTTCAAGG/ | CCTTGAACCAGCTAACAACATTCC/ |
| zma mir | 50 | 1003 |
| 50204 | | |
| Predicted | GTTAATGTTCGCGGAAGGCCA | GTGGCCTTCCGCCTAGAACATTAC |
| zma mir | C/51 | A/1004 |
| 50261 | | |
| Predicted | GTTACGATGATCAGGAGGAGG | ACCTCCTCCTGACTATCATCGTAC |
| zma mir | T/109 | A/1005 |
| 50263 | | |
| Predicted | GTTGTTCTCAGGTCGCCCCCG/ | CGGGGGCGACCCTATGAGAACAC |
| zma mir | 110 | A/1006 |
| 50266 | | |
| Predicted | GTTTGGCATGGCTCAATCAAC/52 | GTTGATTGAGCCTACATGCCAACA/ |
| zma mir | | 1007 |
| 50267 | | |
| Predicted | CATAAAAAGAAACAGAGGGAG/ | CTCCCTCTGTTCTATCTTTTTAGT/ |
| zma mir | 111 | 1008 |
| 50318 | | |
| Predicted | GCCTGACGCCGTGCCACCTCAT/ | ATGAGGTGGCACCTAGGCGTCAGC |
| zma mir | 53 | G/1009 |
| 50460 | | |
| Predicted | AGCCGGCTCGACCCTTCTGC/112 | GCAGAAGGGTCTACGAGCCGGTC/ |
| zma mir | | 1010 |
| 50517 | | |
| Predicted | GCCTGGGCCTCTTTAGACCT/54 | AGGTCTAAAGCTAAGGCCCAGGC/ |
| zma mir | | 1011 |
| 50545 | | |
| Predicted | TGAGGATGGATGGAGAGGGTT | GAACCCTCTCCACTATCCATCCTA |
| zma mir | C/55 | C/1012 |
| 50578 | | |
| Predicted | TAGCCAAGCATGATTTGCCCG/ | CGGGCAAATCACTATGCTTGGCTA/ |
| zma mir | 57 | 1013 |
| 50601 | | |
| Predicted | TCAACGGGCTGGCGGATGTG/56 | CACATCCGCCCTAAGCCCGTTGA/ |
| zma mir | | 1014 |
| 50611 | | |
| Predicted | TGGTAGGATGGATGGAGAGGG | ACCCTCTCCATCCTACATCCTACC |
| zma mir | T/113 | A/1015 |
| 50670 | | |
| zma- | GGCAAGTCTGTCCTTGGCTACA/ | TGTAGCCAAGGACTACAGACTTGC |
| miR169c* | 115 | C/1016 |
| zma- | TAGCCAGGGATGATTTGCCTG/ | CAGGCAAATCACTATCCCTGGCTA/ |
| miR1691 | 817 | 1017 |
| zma- | TAGCCAGGGATGATTTGCCTG/ | CAGGCAAATCACTATCCCTGGCTA/ |
| miR1691* | 818 | 1018 |
| zma- | GGAATCTTGATGATGCTGCAT/ | ATGCAGCATCACTATCAAGATTCC/ |
| miRl72e | 819 | 1019 |
| zma- | TCATTGAGCGCAGCGTTGATG/ | CATCAACGCTGCTACGCTCAATGA/ |
| miR397a | 116 | 1020 |
| zma- | GGGGCGGACTGGGAACACATG/ | CATGTGTTCCCCTAAGTCCGCCCC/ |
| miR398b* | 117 | 1021 |
| zma- | GGGCAACTTCTCCTTTGGCAGA/ | TCTGCCAAAGGACTAGAAGTTGCC |
| miR399f* | 7 | C/1022 |
| zma- | TGCCAAAGGGGATTTGCCCGG/ | CCGGGCAAATCCTACCCTTTGGCA/ |
| miR399g | 118 | 1023 |
| zma- | AGAAGAGAGAGAGTACAGCCT/ | AGGCTGTACTCCTATCTCTCTTCT/ |
| miR529 | 821 | 1024 |
| zma- | TTAGATGACCATCAGCAAACA/ | TGTTTGCTGATCTAGGTCATCTAA/ |
| miR827 | 820 | 1025 |

Table 14: Provided are target-mimic examples for miRNAs of some embodiments of the invention.

TABLE 15
Abbreviations of plant species

| Abbreviation | Organism Name | Common Name |
|---|---|---|
| ahy | Arachis hypogaea | Peanut |
| aly | Arabidopsis lyrata | Arabidopsis lyrata |
| aqc | Aquilegia coerulea | Rocky Mountain Columbine |
| ata | Aegilops taushii | Tausch's goatgrass |
| ath | Arabidopsis thaliana | Arabidopsis thaliana |
| bdi | Brachypodium distachyon | Grass |
| bna | Brassica napus | Brassica napus canola (“liftit”) |
| bol | Brassica oleracea | Brassica oleracea wild cabbage |
| bra | Brassica rapa | Brassica rapa yellow mustard |
| ccl | Citrus clementine | Clementine |
| csi | Citrus sinensis | Orange |
| ctr | Citrus trifoliata | Trifoliate orange |
| gma | Glycine max | Glycine max |
| gso | Glycine soja | Wild soybean |
| hvu | Hordeum vulgare | Barley |
| lja | Lotus japonicus | Lotus japonicus |
| mtr | Medicago truncatula | Medicago truncatula - Barrel Clover (“tiltan”) |
| osa | Oryza sativa | Oryza sativa |
| pab | Picea abies | European spruce |
| ppt | Physcomitrella patens | Physcomitrella patens (moss) |
| pta | Pinus taeda | Pinus taeda - Loblolly Pine |
| ptc | Populus trichocarpa | Populus trichocarpa - black cotton wood |
| rco | Ricinus communis | Castor bean (“kikayon”) |
| sbi | Sorghum bicolor | Sorghum bicolor Dura |
| sly | Solanum lycopersicum | tomato microtom |
| smo | Selaginella moellendorffii | Selaginella moellendorffii |
| sof | Saccharum officinarum | Sugarcane |
| ssp | Saccharum spp | Sugarcane |
| tae | Triticum aestivum | Triticum aestivum |
| tcc | Theobroma cacao | cacao tree and cocoa tree |
| vvi | Vitis vinifera | Vitis vinifera Grapes |
| zma | Zea mays | corn |

Table 15: Provided are the abbreviations and full names of various plant species.

[0248] Although the invention has been described in conjunction with specific embodiments thereof, it is evident that many alternatives, modifications and variations will be apparent to those skilled in the art. Accordingly, it is intended to embrace all such alternatives, modifications and variations that fall within the spirit and broad scope of the appended claims.

[0249] All publications, patents and patent applications mentioned in this specification are herein incorporated in their entirety by reference into the specification, to the same extent as if each individual publication, patent or patent application was specifically and individually indicated to be incorporated herein by reference. In addition, citation or identification of any reference in this application shall not be construed as an admission that such reference is available as prior art to the present invention. To the extent that section headings are used, they should not be construed as necessarily limiting.

1. A method of improving nitrogen use efficiency, abiotic stress tolerance, biomass, vigor or yield of a plant, the method comprising expressing within the plant an exogenous polynucleotide having a nucleic acid sequence at least 90% identical to SEQ ID NOs: 38, 1-37, 39-56, 62, 63, 110, 116, 117, 119-161, 200, 201-255, 1027-1031, 1459-1836, wherein said nucleic acid sequence is capable of regulating nitrogen use efficiency of the plant, thereby improving nitrogen use efficiency, abiotic stress tolerance, biomass, vigor or yield of the plant.

2. A transgenic plant exogenously expressing a polynucleotide having a nucleic acid sequence at least 90% identical to SEQ ID NOs: 38, 1-37, 39-56, 62, 63, 110, 116, 117, 119-161, 200, 201-255, 1027-1031, 1459-1836, wherein said nucleic acid sequence is capable of regulating nitrogen use efficiency of the plant.

3. The method of claim 1, wherein said exogenous polynucleotide encodes a precursor of said nucleic acid sequence.

4. The method or the transgenic plant of claim 3, wherein said precursor is at least 60% identical to SEQ ID NO: 2724, 256-259, 263, 264, 268-270, 272-309, 310-326, 1837-1841, 2269-2619, 2644-2658, 2691-2723, 2725-2741 and 2793.

5. The method of claim 1, wherein said exogenous polynucleotide encodes a miRNA or a precursor thereof.

6. The method of claim 1, wherein said exogenous polynucleotide encodes a siRNA or a precursor thereof.

7. The method of claim 1, wherein said exogenous polynucleotide is selected from the group consisting of SEQ ID NO: 38, 1-37, 39-56, 62, 63, 110, 116, 117, 119-161, 200, 201-255, 1027-1031, 1459-1836.

8. An isolated polynucleotide having a nucleic acid sequence at least 90% identical to SEQ ID NO: 38, 1-3, 8-37, 39-57, 60, 65-113, 119-200, 2691-2792 (novel mirs predicted), wherein said nucleic acid sequence is capable of regulating nitrogen use efficiency of a plant.

9. The isolated polynucleotide of claim 8, wherein said polynucleotide encodes a precursor of said nucleic acid sequence.

10. The isolated polynucleotide of claim 8, wherein said polynucleotide encodes a miRNA or a precursor thereof.

11. The isolated polynucleotide of claim 8, wherein said polynucleotide encodes a siRNA or a precursor thereof.

12. A nucleic acid construct comprising the isolated polynucleotide of claim 8 under the regulation of a cis-acting regulatory element.

13. The nucleic acid construct of claim 12, wherein said cis-acting regulatory element comprises a promoter.

14. The nucleic acid construct of claim 13, wherein said promoter comprises a tissue-specific promoter.

15. The nucleic acid construct of claim 14, wherein said tissue-specific promoter comprises a root specific promoter.

16. A method of improving nitrogen use efficiency, abiotic stress tolerance, biomass, vigor or yield of a plant, the method comprising expressing within the plant an exogenous polynucleotide which downregulates an activity or expression of a gene encoding an RNAi molecule having a nucleic acid sequence selected from the group consisting of SEQ ID NOs: 57-61, 64-115, 118, 162-200, 260-262, 265-267, 271, 1032-1455, 1810-1827, 1842-2265, 2620-2643, 2742-2792, thereby improving nitrogen use efficiency, abiotic stress tolerance, biomass, vigor or yield of a plant.

17. A transgenic plant exogenously expressing a polynucleotide which downregulates an activity or expression of a gene encoding an RNAi molecule having a nucleic acid sequence selected from the group consisting of SEQ ID NOs: 57-61, 64-115, 118, 162-200, 260-262, 265-267, 271, 1032-1455, 1810-1827, 1842-2265, 2620-2643, 2742-2792.

18. An isolated polynucleotide which downregulates an activity or expression of a gene encoding an RNAi molecule having a nucleic acid sequence selected from the group consisting of SEQ ID NOs: 57-61, 64-115, 118, 162-200, 260-262, 265-267, 271, 1032-1455, 1810-1827, 1842-2265, 2620-2643, 2742-2792.

19. The method of claim 16, the transgenic plant of claim 17, wherein said polynucleotide encodes a miRNA-Resistant Target as set forth in SEQ ID NO: 616-815.

20. The method of claim 16, wherein said isolated polynucleotide encodes a target mimic as set forth in SEQ ID NO: 822-1025.

21. A nucleic acid construct comprising the isolated polynucleotide of claim 18 under the regulation of a cis-acting regulatory element.

22. The nucleic acid construct of claim 21, wherein said cis-acting regulatory element comprises a promoter.

23. The nucleic acid construct of claim 22, wherein said promoter comprises a tissue-specific promoter.

24. The nucleic acid construct of claim 23, wherein said tissue-specific promoter comprises a root specific promoter.

25. The method of claim 1, further comprising growing the plant under limiting nitrogen conditions.

26. The method of claim 1, further comprising growing the plant under abiotic stress.

27. The method of claim 26, wherein said abiotic stress is selected from the group consisting of salinity, drought, water deprivation, flood, etiolation, low temperature, high temperature, heavy metal toxicity, anaerobiosis, nutrient deficiency, nutrient excess, atmospheric pollution and UV irradiation.

28. The method of claim 1, being a monocotyledon.

29. The method of claim 1, being a dicotyledon.

The application's sequence listing, which the Patent Office published only in electronic form, follows.

SEQUENCE LISTING (2793 sequences)

SEQ ID NO: 1 - DNA, 22 bp, Zea mays
ccaagtcgagggcagaccaggc

SEQ ID NO: 2 - DNA, 21 bp, Zea mays
aggatgctgacgcaatgggat

SEQ ID NO: 3 - DNA, 24 bp, Zea mays
gtcaagtgactaagagcatgtggt

SEQ ID NO: 4 - DNA, 21 bp, Oryza sativa
tggtgagccttcctggctaag

SEQ ID NO: 5 - DNA, 24 bp, Oryza sativa
tcacggaaaacgagggagcagcca

SEQ ID NO: 6 - DNA, 21 bp, Oryza sativa
cctgaggggaaatcggcggga

SEQ ID NO: 7 - DNA, 22 bp, Zea mays
gggcaacttctcctttggcaga

SEQ ID NO: 8 - DNA, 24 bp, Artificial sequence
  Predicted folded 24-nts-long
aactaaaacgaaacggaaggagta

SEQ ID NO: 9 - DNA, 24 bp, Artificial sequence
  Predicted folded 24-nts-long
aaggtgcttttaggagtaggacgg

SEQ ID NO: 10 - DNA, 24 bp, Artificial sequence
  Predicted folded 24-nts-long
acaaaggaattagaacggaatggc

SEQ ID NO: 11 - DNA, 24 bp, Artificial sequence
  Predicted folded 24-nts-long
agaatcaggaatggaacggctccg

SEQ ID NO: 12 - DNA, 24 bp, Artificial sequence
  Predicted folded 24-nts-long
agaatcagggatggaacggctcta

SEQ ID NO: 13 - DNA, 24 bp, Artificial sequence
  Predicted folded 24-nts-long
agagtcacgggcgagaagaggacg

SEQ ID NO: 14 - DNA, 24 bp, Artificial sequence
  Predicted folded 24-nts-long
aggacctagatgagcgggcggttt

SEQ ID NO: 15 - DNA, 24 bp, Artificial sequence
  Predicted folded 24-nts-long
aggacgctgctggagacggagaat

SEQ ID NO: 16 - DNA, 24 bp, Artificial sequence
  Predicted folded 24-nts-long
agggcttgttcggtttgaaggggt

SEQ ID NO: 17 - DNA, 24 bp, Artificial sequence
  Predicted folded 24-nts-long
atctttcaacggctgcgaagaagg

SEQ ID NO: 18 - DNA, 24 bp, Artificial sequence
  Predicted folded 24-nts-long
ctagaattagggatggaacggctc

SEQ ID NO: 19 - DNA, 24 bp, Artificial sequence
  Predicted folded 24-nts-long
gagggataactggggacaacacgg

SEQ ID NO: 20 - DNA, 24 bp, Artificial sequence
  Predicted folded 24-nts-long
gcggagtgggatggggagtgttgc

SEQ ID NO: 21 - DNA, 24 bp, Artificial sequence
  Predicted folded 24-nts-long
ggagacggatgcggagactgctgg

SEQ ID NO: 22 - DNA, 24 bp, Artificial sequence
  Predicted folded 24-nts-long
ggttaggagtggattgagggggat

SEQ ID NO: 23 - DNA, 24 bp, Artificial sequence
  Predicted folded 24-nts-long
gtcaagtgactaagagcatgtggt

SEQ ID NO: 24 - DNA, 24 bp, Artificial sequence
  Predicted folded 24-nts-long
gtggaatggaggagattgagggga

SEQ ID NO: 25 - DNA, 24 bp, Artificial sequence
  Predicted folded 24-nts-long
tggctgaaggcagaaccaggggag

SEQ ID NO: 26 - DNA, 24 bp, Artificial sequence
  Predicted folded 24-nts-long
tgtggtagagaggaagaacaggac

SEQ ID NO: 27 - DNA, 24 bp, Artificial sequence
  Predicted folded 24-nts-long
agggactctctttatttccgacgg

SEQ ID NO: 28 - DNA, 24 bp, Artificial sequence
  Predicted folded 24-nts-long
agggttcgtttcctgggagcgcgg

SEQ ID NO: 29 - DNA, 24 bp, Artificial sequence
  Predicted folded 24-nts-long
tcctagaatcagggatggaacggc

SEQ ID NO: 30 - DNA, 24 bp, Artificial sequence
  Predicted folded 24-nts-long
tgggagctctctgttcgatggcgc

SEQ ID NO: 31 - DNA, 22 bp, Artificial sequence
  Predicted Zea mays mir
aacgtcgtgtcgtgcttgggct

SEQ ID NO: 32 - DNA, 22 bp, Artificial sequence
  Predicted Zea mays mir
acctggaccaatacatgagatt

SEQ ID NO: 33 - DNA, 22 bp, Artificial sequence
  Predicted Zea mays mir
agaagcgacaatgggacggagt

SEQ ID NO: 34 - DNA, 23 bp, Artificial sequence
  Predicted Zea mays mir
aggaaggaacaaacgaggataag

SEQ ID NO: 35 - DNA, 22 bp, Artificial sequence
  Predicted Zea mays mir
ccaagagatggaagggcagagc

SEQ ID NO: 36 - DNA, 21 bp, Artificial sequence
  Predicted Zea mays mir
cgacaacgggacggagttcaa

SEQ ID NO: 37 - DNA, 22 bp, Artificial sequence
  Predicted Zea mays mir
gaggatggagaggtacgtcaga

SEQ ID NO: 38 - DNA, 23 bp, Artificial sequence
  Predicted Zea mays mir
gatgggtaggagagcgtcgtgtg

SEQ ID NO: 39 - DNA, 22 bp, Artificial sequence
  Predicted Zea mays mir
gatggttcataggtgacggtag

SEQ ID NO: 40 - DNA, 22 bp, Artificial sequence
  Predicted Zea mays mir
gggagccgagacatagagatgt

SEQ ID NO: 41 - DNA, 22 bp, Artificial sequence
  Predicted Zea mays mir
gtgaggagtgataatgagacgg

SEQ ID NO: 42 - DNA, 23 bp, Artificial sequence
  Predicted Zea mays mir
gtttggggctttagcaggtttat

SEQ ID NO: 43 - DNA, 22 bp, Artificial sequence
  Predicted Zea mays mir
tccatagctgggcggaagagat

SEQ ID NO: 44 - DNA, 21 bp, Artificial sequence
  Predicted Zea mays mir
tcggcatgtgtaggataggtg

SEQ ID NO: 45 - DNA, 22 bp, Artificial sequence
  Predicted Zea mays mir
tgataggctgggtgtggaagcg

SEQ ID NO: 46 - DNA, 22 bp, Artificial sequence
  Predicted Zea mays mir
tgcaaacagactggggaggcga

SEQ ID NO: 47 - DNA, 22 bp, Artificial sequence
  Predicted Zea mays mir
tttggctgacaggataagggag

SEQ ID NO: 48 - DNA, 22 bp, Artificial sequence
  Predicted Zea mays mir
ttttcatagctgggcggaagag

SEQ ID NO: 49 - DNA, 24 bp, Artificial sequence
  Predicted Zea mays mir
aactttaaataggtaggacggcgc

SEQ ID NO: 50 - DNA, 21 bp, Artificial sequence
  Predicted Zea mays mir
ggaatgttgtctggttcaagg

SEQ ID NO: 51 - DNA, 22 bp, Artificial sequence
  Predicted Zea mays mir
tgtaatgttcgcggaaggccac

SEQ ID NO: 52 - DNA, 21 bp, Artificial sequence
  Predicted Zea mays mir
tgttggcatggctcaatcaac

SEQ ID NO: 53 - DNA, 22 bp, Artificial sequence
  Predicted Zea mays mir
cgctgacgccgtgccacctcat

SEQ ID NO: 54 - DNA, 20 bp, Artificial sequence
  Predicted Zea mays mir
gcctgggcctctttagacct

SEQ ID NO: 55 - DNA, 22 bp, Artificial sequence
  Predicted Zea mays mir
gtaggatggatggagagggttc

SEQ ID NO: 56 - DNA, 20 bp, Artificial sequence
  Predicted Zea mays mir
tcaacgggctggcggatgtg

SEQ ID NO: 57 - DNA, 21 bp, Zea mays
tagccaagcatgatttgcccg

SEQ ID NO: 58 - DNA, 21 bp, Aquilegia caerulea
agaagagagagagcacaaccc

SEQ ID NO: 59 - DNA, 22 bp, Arabidopsis thaliana
cttgagagagagaacacagacg

SEQ ID NO: 60 - DNA, 21 bp, Zea mays
caggcagcgcggggctgctgg

SEQ ID NO: 61 - DNA, 21 bp, Medicago truncatula
tgagccaggatgacttgccgg

SEQ ID NO: 62 - DNA, 21 bp, Medicago truncatula
atgaagtgtttgggggaactc

SEQ ID NO: 63 - DNA, 21 bp, Oryza sativa
gtgaagtgtttgggggaactc

SEQ ID NO: 64 - DNA, 20 bp, Populus euphratica
ggccgggggacgggctggga

SEQ ID NO: 65 - DNA, 24 bp, Artificial sequence
  Predicted folded 24-nts-long sequence
aaaaaagactgagccgaattgaaa

SEQ ID NO: 66 - DNA, 24 bp, Artificial sequence
  Predicted folded 24-nts-long sequence
aaggagtttaatgaagaaagagag

SEQ ID NO: 67 - DNA, 24 bp, Artificial sequence
  Predicted folded 24-nts-long sequence
actgatgacgacactgaggaggct

SEQ ID NO: 68 - DNA, 24 bp, Artificial sequence
  Predicted folded 24-nts-long sequence
agaggaaccagagccgaagccgtt

SEQ ID NO: 69 - DNA, 24 bp, Artificial sequence
  Predicted folded 24-nts-long sequence
aggcaaggtggaggacgttgatga

SEQ ID NO: 70 - DNA, 24 bp, Artificial sequence
  Predicted folded 24-nts-long sequence
agggctgatttggtgacaagggga

SEQ ID NO: 71 - DNA, 24 bp, Artificial sequence
  Predicted folded 24-nts-long sequence
atataaagggaggaggtatggacc

SEQ ID NO: 72 - DNA, 24 bp, Artificial sequence
  Predicted folded 24-nts-long sequence
atcggtcagctggaggagacaggt

SEQ ID NO: 73 - DNA, 24 bp, Artificial sequence
  Predicted folded 24-nts-long sequence
atggtaagagactatgatccaact

SEQ ID NO: 74 - DNA, 24 bp, Artificial sequence
  Predicted folded 24-nts-long sequence
caattttgtactggatcggggcat

SEQ ID NO: 75 - DNA, 24 bp, Artificial sequence
  Predicted folded 24-nts-long sequence
cagaggaaccagagccgaagccgt

SEQ ID NO: 76 - DNA, 24 bp, Artificial sequence
  Predicted folded 24-nts-long sequence
cggctggacagggaagaagagcac

SEQ ID NO: 77 - DNA, 24 bp, Artificial sequence
  Predicted folded 24-nts-long sequence
gaaacttggagagatggaggcttt

SEQ ID NO: 78 - DNA, 24 bp, Artificial sequence
  Predicted folded 24-nts-long sequence
gagagagaagggagcggatctggt

SEQ ID NO: 79 - DNA, 24 bp, Artificial sequence
  Predicted folded 24-nts-long sequence
gctgcacgggattggtggagaggt

SEQ ID NO: 80 - DNA, 24 bp, Artificial sequence
  Predicted folded 24-nts-long sequence
ggctgctggagagcgtagaggacc

SEQ ID NO: 81 - DNA, 24 bp, Artificial sequence
  Predicted folded 24-nts-long sequence
gggttttgagagcgagtgaagggg

SEQ ID NO: 82 - DNA, 24 bp, Artificial sequence
  Predicted folded 24-nts-long sequence
ggtattggggtggattgaggtgga

SEQ ID NO: 83 - DNA, 24 bp, Artificial sequence
  Predicted folded 24-nts-long sequence
ggtggcgatgcaagaggagctcaa

SEQ ID NO: 84 - DNA, 24 bp, Artificial sequence
  Predicted folded 24-nts-long sequence
gttgctggagagagtagaggacgt

SEQ ID NO: 85 - DNA, 22 bp, Artificial sequence
  Predicted Zea Mays mir sequence
aaaagagaaaccgaagacacat

SEQ ID NO: 86 - DNA, 22 bp, Artificial sequence
  Predicted Zea Mays mir sequence
aaagaggatgaggagtagcatg

SEQ ID NO: 87 - DNA, 21 bp, Artificial sequence
  Predicted Zea Mays mir sequence
aatacacatgggttgaggagg

SEQ ID NO: 88 - DNA, 22 bp, Artificial sequence
  Predicted Zea Mays mir sequence
agaagcggactgccaaggaggc

SEQ ID NO: 89 - DNA, 23 bp, Artificial sequence
  Predicted Zea Mays mir sequence
agagggtttggggatagagggac

SEQ ID NO: 90 - DNA, 21 bp, Artificial sequence
  Predicted Zea Mays mir sequence
atagggatgaggcagagcatg

SEQ ID NO: 91 - DNA, 22 bp, Artificial sequence
  Predicted Zea Mays mir sequence
atgctatttgtacccgtcaccg

SEQ ID NO: 92 - DNA, 22 bp, Artificial sequence
  Predicted Zea Mays mir sequence
atgtggataaaaggagggatga

SEQ ID NO: 93 - DNA, 22 bp, Artificial sequence
  Predicted Zea Mays mir sequence
caacaggaacaaggaggaccat

SEQ ID NO: 94 - DNA, 21 bp, Artificial sequence
  Predicted Zea Mays mir sequence
ctgagttgagaaagagatgct

SEQ ID NO: 95 - DNA, 22 bp, Artificial sequence
  Predicted Zea Mays mir sequence
ctgatgggaggtggagttgcat

SEQ ID NO: 96 - DNA, 23 bp, Artificial sequence
  Predicted Zea Mays mir sequence
ctgggaagatggaacattttggt

SEQ ID NO: 97 - DNA, 22 bp, Artificial sequence
  Predicted Zea Mays mir sequence
gaagatatacgatgatgaggag

SEQ ID NO: 98 - DNA, 21 bp, Artificial sequence
  Predicted Zea Mays mir sequence
gaatctatcgtttgggctcat

SEQ ID NO: 99 - DNA, 21 bp, Artificial sequence
  Predicted Zea Mays mir sequence
gacgagctacaaaaggattcg

SEQ ID NO: 100 - DNA, 22 bp, Artificial sequence
  Predicted Zea Mays mir sequence
gatgacgaggagtgagagtagg

SEQ ID NO: 101 - DNA, 23 bp, Artificial sequence
  Predicted Zea Mays mir sequence
gggcatcttctggcaggaggaca

SEQ ID NO: 102 - DNA, 21 bp, Artificial sequence
  Predicted Zea Mays mir sequence
tacggaagaagagcaagtttt

SEQ ID NO: 103 - DNA, 22 bp, Artificial sequence
  Predicted Zea Mays mir sequence
tagaaagagcgagagaacaaag

SEQ ID NO: 104 - DNA, 21 bp, Artificial sequence
  Predicted Zea Mays mir sequence
tgatattatggacgactggtt

SEQ ID NO: 105 - DNA, 21 bp, Artificial sequence
  Predicted Zea Mays mir sequence
tggaagggccatgccgaggag

SEQ ID NO: 106 - DNA, 21 bp, Artificial sequence
  Predicted Zea Mays mir sequence
ttgagcgcagcgttgatgagc

SEQ ID NO: 107 - DNA, 23 bp, Artificial sequence
  Predicted Zea Mays mir sequence
ttggataacgggtagtttggagt

SEQ ID NO: 108 - DNA, 21 bp, Artificial sequence
  Predicted Zea Mays mir sequence
agctgccgactcattcaccca

SEQ ID NO: 109 - DNA, 22 bp, Artificial sequence
  Predicted Zea Mays mir sequence
tgtacgatgatcaggaggaggt

SEQ ID NO: 110 - DNA, 21 bp, Artificial sequence
  Predicted Zea Mays mir sequence
tgtgttctcaggtcgcccccg

SEQ ID NO: 111 - DNA, 21 bp, Artificial sequence
  Predicted Zea Mays mir sequence
actaaaaagaaacagagggag

SEQ ID NO: 112 - DNA, 20 bp, Artificial sequence
  Predicted Zea Mays mir sequence
gaccggctcgacccttctgc

SEQ ID NO: 113 - DNA, 22 bp, Artificial sequence
  Predicted Zea Mays mir sequence
tggtaggatggatggagagggt

SEQ ID NO: 114 - DNA, 21 bp, Zea mays
ggaatgttgtctggttcaagg

SEQ ID NO: 115 - DNA, 22 bp, Zea mays
ggcaagtctgtccttggctaca

SEQ ID NO: 116 - DNA, 21 bp, Zea mays
tcattgagcgcagcgttgatg

SEQ ID NO: 117 - DNA, 21 bp, Zea mays
ggggcggactgggaacacatg

SEQ ID NO: 118 - DNA, 21 bp, Zea mays
tgccaaaggggatttgcccgg

SEQ ID NO: 119 - DNA, 24 bp, Artificial sequence
  Predicted siRNA sequence
aagaaacggggcagtgagatggac

SEQ ID NO: 120 - DNA, 25 bp, Artificial sequence
  Predicted siRNA sequence
agaaaagattgagccgaattgaatt

SEQ ID NO: 121 - DNA, 22 bp, Artificial sequence
  Predicted siRNA sequence
agagcctgtagctaatggtggg

SEQ ID NO: 122 - DNA, 24 bp, Artificial sequence
  Predicted siRNA sequence
aggtagcggcctaagaacgacaca

SEQ ID NO: 123 - DNA, 24 bp, Artificial sequence
  Predicted siRNA sequence
cctatatactggaacggaacggct

SEQ ID NO: 124 - DNA, 24 bp, Artificial sequence
  Predicted siRNA sequence
ctatatactggaacggaacggctt

SEQ ID NO: 125 - DNA, 24 bp, Artificial sequence
  Predicted siRNA sequence
gacgagatcgagtctggagcgagc

SEQ ID NO: 126 - DNA, 22 bp, Artificial sequence
  Predicted siRNA sequence
gagtatggggagggactaggga

SEQ ID NO: 127 - DNA, 24 bp, Artificial sequence
  Predicted siRNA sequence
gacgaaatagaggctcaggagagg

SEQ ID NO: 128 - DNA, 22 bp, Artificial sequence
  Predicted siRNA sequence
ggattcgtgattggcgatgggg

SEQ ID NO: 129 - DNA, 24 bp, Artificial sequence
  Predicted siRNA sequence
ggtgagaaacggaaaggcaggaca

SEQ ID NO: 130 - DNA, 24 bp, Artificial sequence
  Predicted siRNA sequence
gtgtctgagcagggtgagaaggct

SEQ ID NO: 131 - DNA, 24 bp, Artificial sequence
  Predicted siRNA sequence
gttttggaggcgtaggcgagggat

SEQ ID NO: 132 - DNA, 21 bp, Artificial sequence
  Predicted siRNA sequence
tgggacgctgcatctgttgat

SEQ ID NO: 133 - DNA, 24 bp, Artificial sequence
  Predicted siRNA sequence
tctatatactggaacggaacggct

SEQ ID NO: 134 - DNA, 24 bp, Artificial sequence
  Predicted siRNA sequence
gttgttggaggggtagaggacgtc

SEQ ID NO: 135 - DNA, 24 bp, Artificial sequence
  Predicted siRNA sequence
aatgacaggacgggatgggacggg

SEQ ID NO: 136 - DNA, 24 bp, Artificial sequence
  Predicted siRNA sequence
acggaacggcttcataccacaata

SEQ ID NO: 137 - DNA, 24 bp, Artificial sequence
  Predicted siRNA sequence
gacgggccgacatttagagcacgg

SEQ ID NO: 138 - DNA, 18 bp, Artificial sequence
  Predicted siRNA sequence
acggataaaaggtactct

SEQ ID NO: 139 - DNA, 22 bp, Artificial sequence
  Predicted siRNA sequence
agtatgtcgaaaactggagggc

SEQ ID NO: 140 - DNA, 19 bp, Artificial sequence
  Predicted siRNA sequence
ataagcaccggctaactct

SEQ ID NO: 141 - DNA, 24 bp, Artificial sequence
  Predicted siRNA sequence
attcagcgggcgtggttattggca

SEQ ID NO: 142 - DNA, 20 bp, Artificial sequence
  Predicted siRNA sequence
cagcgggtgccatagtcgat

SEQ ID NO: 143 - DNA, 18 bp, Artificial sequence
  Predicted siRNA sequence
cattgcgacggtcctcaa

SEQ ID NO: 144 - DNA, 19 bp, Artificial sequence
  Predicted siRNA sequence
ctcaacggataaaaggtac

SEQ ID NO: 145 - DNA, 19 bp, Artificial sequence
  Predicted siRNA sequence
gacagtcaggatgttggct

SEQ ID NO: 146 - DNA, 22 bp, Artificial sequence
  Predicted siRNA sequence
gactgatccttcggtgtcggcg

SEQ ID NO: 147 - DNA, 24 bp, Artificial sequence
  Predicted siRNA sequence
gccgaagattaaaagacgagacga

SEQ ID NO: 148 - DNA, 20 bp, Artificial sequence
  Predicted siRNA sequence
gcctttgccgaccatcctga

SEQ ID NO: 149 - DNA, 22 bp, Artificial sequence
  Predicted siRNA sequence
ggaatcgctagtaatcgtggat

SEQ ID NO: 150 - DNA, 20 bp, Artificial sequence
  Predicted siRNA sequence
ggagcagctctggtcgtggg

SEQ ID NO: 151 - DNA, 21 bp, Artificial sequence
  Predicted siRNA sequence
ggaggctcgactatgttcaaa

SEQ ID NO: 152 - DNA, 22 bp, Artificial sequence
  Predicted siRNA sequence
ggagggatgtgagaacatgggc

SEQ ID NO: 153 - DNA, 19 bp, Artificial sequence
  Predicted siRNA sequence
gtccccttcgtctagaggc

SEQ ID NO: 154 - DNA, 20 bp, Artificial sequence
  Predicted siRNA sequence
gtctgagtggtgtagttggt

SEQ ID NO: 155 - DNA, 18 bp, Artificial sequence
  Predicted siRNA sequence
gttggtagagcagttggc

SEQ ID NO: 156 - DNA, 21 bp, Artificial sequence
  Predicted siRNA sequence
tacgttcccgggtcttgtaca

SEQ ID NO: 157 - DNA, 20 bp, Artificial sequence
  Predicted siRNA sequence
tatggatgaagatgggggtg

SEQ ID NO: 158 - DNA, 22 bp, Artificial sequence
  Predicted siRNA sequence
tcaacggataaaaggtactccg

SEQ ID NO: 159 - DNA, 18 bp, Artificial sequence
  Predicted siRNA sequence
tgcccagtgctttgaatg

SEQ ID NO: 160 - DNA, 21 bp, Artificial sequence
  Predicted siRNA sequence
tgcgagaccgacaagtcgagc

SEQ ID NO: 161 - DNA, 20 bp, Artificial sequence
  Predicted siRNA sequence
tttgcgacacgggctgctct

SEQ ID NO: 162 - DNA, 22 bp, Artificial sequence
  Predicted siRNA sequence
catcgctcaacggacaaaaggt

SEQ ID NO: 163 - DNA, 24 bp, Artificial sequence
  Predicted siRNA sequence
aagacgaaggtagcagcgcgatat

SEQ ID NO: 164 - DNA, 24 bp, Artificial sequence
  Predicted siRNA sequence
agccagactgatgagagaaggagg

SEQ ID NO: 165 - DNA, 24 bp, Artificial sequence
  Predicted siRNA sequence
acgttgttggaagggtagaggacg

SEQ ID NO: 166 - DNA, 21 bp, Artificial sequence
  Predicted siRNA sequence
caagttatgcagttgctgcct

SEQ ID NO: 167 - DNA, 22 bp, Artificial sequence
  Predicted siRNA sequence
cagaatggaggaagagatggtg

SEQ ID NO: 168 - DNA, 24 bp, Artificial sequence
  Predicted siRNA sequence
atctgtggagagagaaggttgccc

SEQ ID NO: 169 - DNA, 22 bp, Artificial sequence
  Predicted siRNA sequence
atgtcagggggccatgcagtat

SEQ ID NO: 170 - DNA, 24 bp, Artificial sequence
  Predicted siRNA sequence
atcctgactgtgccgggccggccc

SEQ ID NO: 171 - DNA, 22 bp, Artificial sequence
  Predicted siRNA sequence
cgagttcgccgtagagaaagct

SEQ ID NO: 172 - DNA, 24 bp, Artificial sequence
  Predicted siRNA sequence
gactgattcggacgaaggagggtt

SEQ ID NO: 173 - DNA, 23 bp, Artificial sequence
  Predicted siRNA sequence
gtctgaacactaaacgaagcaca

SEQ ID NO: 174 - DNA, 24 bp, Artificial sequence
  Predicted siRNA sequence
gacgttgttggaagggtagaggac

SEQ ID NO: 175 - DNA, 24 bp, Artificial sequence
  Predicted siRNA sequence
gctactgtagttcacgggccggcc

SEQ ID NO: 176 - DNA, 25 bp, Artificial sequence
  Predicted siRNA sequence
ggtattcgtgagcctgtttctggtt

SEQ ID NO: 177 - DNA, 22 bp, Artificial sequence
  Predicted siRNA sequence
tggaaggagcatgcatcttgag

SEQ ID NO: 178 - DNA, 21 bp, Artificial sequence
  Predicted siRNA sequence
ttcttgaccttgtaagaccca

SEQ ID NO: 179 - DNA, 22 bp, Artificial sequence
  Predicted siRNA sequence
agcagaatggaggaagagatgg

SEQ ID NO: 180 - DNA, 24 bp, Artificial sequence
  Predicted siRNA sequence
ctggacactgttgcagaaggagga

SEQ ID NO: 181 - DNA, 24 bp, Artificial sequence
  Predicted siRNA sequence
gaaataggataggaggagggatga

SEQ ID NO: 182 - DNA, 24 bp, Artificial sequence
  Predicted siRNA sequence
ggcacgactaacagactcacgggc

SEQ ID NO: 183 - DNA, 19 bp, Artificial sequence
  Predicted siRNA sequence
aatcccggtggaacctcca

SEQ ID NO: 184 - DNA, 24 bp, Artificial sequence
  Predicted siRNA sequence
acacgacaagacgaatgagagaga

SEQ ID NO: 185 - DNA, 20 bp, Artificial sequence
  Predicted siRNA sequence
acgacgaggacttcgagacg

SEQ ID NO: 186 - DNA, 19 bp, Artificial sequence
  Predicted siRNA sequence
caaagtggtcgtgccggag

SEQ ID NO: 187 - DNA, 20 bp, Artificial sequence
  Predicted siRNA sequence
cagcttgagaatcgggccgc

SEQ ID NO: 188 - DNA, 19 bp, Artificial sequence
  Predicted siRNA sequence
ccctgtgacaagaggagga

SEQ ID NO: 189 - DNA, 23 bp, Artificial sequence
  Predicted siRNA sequence
cctgctaactagttatgcggagc

SEQ ID NO: 190 - DNA, 19 bp, Artificial sequence
  Predicted siRNA sequence
cgaactcagaagtgaaacc

SEQ ID NO: 191 - DNA, 21 bp, Artificial sequence
  Predicted siRNA sequence
cgcttcgtcaaggagaagggc

SEQ ID NO: 192 - DNA, 26 bp, Artificial sequence
  Predicted siRNA sequence
cttaactgggcgttaagttgcagggt

SEQ ID NO: 193 - DNA, 20 bp, Artificial sequence
  Predicted siRNA sequence
ggacgaacctctggtgtacc

SEQ ID NO: 194 - DNA, 19 bp, Artificial sequence
  Predicted siRNA sequence
ggcgctggagaactgaggg

SEQ ID NO: 195 - DNA, 19 bp, Artificial sequence
  Predicted siRNA sequence
gggggcctaaataaagact

SEQ ID NO: 196 - DNA, 20 bp, Artificial sequence
  Predicted siRNA sequence
gtgctaacgtccgtcgtgaa

SEQ ID NO: 197 - DNA, 20 bp, Artificial sequence
  Predicted siRNA sequence
tagcttaaccttcgggaggg

SEQ ID NO: 198 - DNA, 22 bp, Artificial sequence
  Predicted siRNA sequence
tgagaaagaaagagaaggctca

SEQ ID NO: 199 - DNA, 23 bp, Artificial sequence
  Predicted siRNA sequence
tgatgtccttagatgttctgggc

SEQ ID NO: 200 - DNA, 21 bp, Artificial sequence
  Predicted siRNA sequence
catgtgttctcaggtcgcccc

SEQ ID NO: 201 - DNA, 22 bp, Arabidopsis lyrata
gggcaaatactccattggcaga

SEQ ID NO: 202 - DNA, 22 bp, Arabidopsis lyrata
gggcaaatactccattggcaga

SEQ ID NO: 203 - DNA, 22 bp, Arabidopsis lyrata
gggcgaatactcctatggcaga

SEQ ID NO: 204 - DNA, 22 bp, Arabidopsis lyrata
gggcaagatcaccattggcaga

SEQ ID NO: 205 - DNA, 21 bp, Arabidopsis lyrata
gggcgcctctccattggcagg

SEQ ID NO: 206 - DNA, 21 bp, Arabidopsis lyrata
gggcatctttctattggcagg

SEQ ID NO: 207 - DNA, 22 bp, Arabidopsis lyrata
gggcaagatctctattggcagg

SEQ ID NO: 208 - DNA, 21 bp, Zea mays
gggtacgtctcctttggcaca

SEQ ID NO: 209 - DNA, 21 bp, Zea mays
gggcaaccccccgttggcagg

SEQ ID NO: 210 - DNA, 21 bp, Zea mays
aggcagctctcctctggcagg

SEQ ID NO: 211 - DNA, 22 bp, Arabidopsis lyrata
gggtaagatctctattggcagg

SEQ ID NO: 212 - DNA, 22 bp, Arabidopsis lyrata
gggcgaatcctctattggcagg

SEQ ID NO: 213 - DNA, 21 bp, Zea mays
gtgcagctctcctctggcatg

SEQ ID NO: 214 - DNA, 21 bp, Zea mays
gtgcagttctcctctggcacg

SEQ ID NO: 215 - DNA, 21 bp, Zea mays
gtgcggttctcctctggcacg

SEQ ID NO: 216 - DNA, 21 bp, Zea mays
gggcttctctttcttggcagg

SEQ ID NO: 217 - DNA, 21 bp, Zea mays
gtgcggctctcctctggcatg

SEQ ID NO: 218 - DNA, 21 bp, Zea mays
gtgtggctctcctctggcatg

SEQ ID NO: 219 - DNA, 21 bp, Zea mays
ggaatgttgtctggttcaagg

SEQ ID NO: 220 - DNA, 21 bp, Zea mays
ggaatgttgtctggttcaagg

SEQ ID NO: 221 - DNA, 21 bp, Arabidopsis lyrata
ggaatgttgtctggctcgagg

SEQ ID NO: 222 - DNA, 21 bp, Arabidopsis lyrata
ggaatgttgtctggctcgagg

SEQ ID NO: 223 - DNA, 21 bp, Arabidopsis lyrata
ggaatgttgtctggctcgagg

SEQ ID NO: 224 - DNA, 21 bp, Citrus sinensis
ggaatgttgtctggctcgagg

SEQ ID NO: 225 - DNA, 21 bp, Zea mays
ggaatgttgtctggctcgagg

SEQ ID NO: 226 - DNA, 22 bp, Zea mays
ggtttgtttgtctggttcaagg

SEQ ID NO: 227 - DNA, 21 bp, Arabidopsis lyrata
ggactgttgtctggctcgagg

SEQ ID NO: 228 - DNA, 21 bp, Arabidopsis lyrata
ggaatgttgtctggcacgagg

SEQ ID NO: 229 - DNA, 21 bp, Arabidopsis lyrata
ggaatgttgtttggctcgagg

SEQ ID NO: 230 - DNA, 21 bp, Zea mays
ggaatgttgtctggctcgggg

SEQ ID NO: 231 - DNA, 21 bp, Zea mays
ggaatgttgtctggttggaga

SEQ ID NO: 232 - DNA, 21 bp, Zea mays
ggaatgttggctggctcgagg

SEQ ID NO: 233 - DNA, 21 bp, Zea mays
ggattgttgtctggctcgggg

SEQ ID NO: 234 - DNA, 21 bp, Zea mays
ggaatgtcgtctggcgcgaga

SEQ ID NO: 235 - DNA, 21 bp, Zea mays
ggattgttgtctggctcggtg

SEQ ID NO: 236 - DNA, 21 bp, Arabidopsis lyrata
tgaatgatgcctggctcgaga

SEQ ID NO: 237 - DNA, 20 bp, Zea mays
gaatggaggctggtccaaga

SEQ ID NO: 238 - DNA, 21 bp, Zea mays
ggaatgacgtccggtccgaac

SEQ ID NO: 239 - DNA, 21 bp, Zea mays
ggggcgaactgagaacacatg

SEQ ID NO: 240 - DNA, 21 bp, Aquilegia caerulea
tgtgttctcaggtcgcccctg

SEQ ID NO: 241 - DNA, 21 bp, Brachypodium distachyon
tgtgttctcaggtcgcccctg

SEQ ID NO: 242 - DNA, 21 bp, Brachypodium distachyon
tgtgttctcaggtcgcccctg

SEQ ID NO: 243 - DNA, 21 bp, Medicago truncatula
tgtgttctcaggtcgcccctg

SEQ ID NO: 244 - DNA, 21 bp, Medicago truncatula
tgtgttctcaggtcgcccctg

SEQ ID NO: 245 - DNA, 21 bp, Oryza sativa
tgtgttctcaggtcgcccctg

SEQ ID NO: 246 - DNA, 21 bp, Populus trichocarpa
tgtgttctcaggtcgcccctg

SEQ ID NO: 247 - DNA, 21 bp, Populus trichocarpa
tgtgttctcaggtcgcccctg

SEQ ID NO: 248 - DNA, 21 bp, Ricinus communis
tgtgttctcaggtcgcccctg

SEQ ID NO: 249 - DNA, 21 bp, Sorghum bicolor
tgtgttctcaggtcgcccccg

SEQ ID NO: 250 - DNA, 21 bp, Triticum aestivum
tgtgttctcaggtcgcccccg

SEQ ID NO: 251 - DNA, 21 bp, Theobroma cacao
tgtgttctcaggtcgcccctg

SEQ ID NO: 252 - DNA, 21 bp, Vitis vinifera
tgtgttctcaggtcgcccctg

SEQ ID NO: 253 - DNA, 21 bp, Vitis vinifera
tgtgttctcaggtcgcccctg

SEQ ID NO: 254 - DNA, 21 bp, Zea mays
tgtgttctcaggtcgcccccg

SEQ ID NO: 255 - DNA, 21 bp, Zea mays
tgtgttctcaggtcgcccccg

SEQ ID NO: 256 - DNA, 142 bp, Oryza sativa
atgaggagattgcctctgttagccaagaatggcttgcctatctccactatttggttcatcactggaacacacttggggttctcagatggtggatgaaatatggaagatggtgagccttcctggctaagagagtgattctcat

SEQ ID NO: 257 - DNA, 169 bp, Oryza sativa
ggaaaggctttgtaaaacacactatttgacagtttggaaagcgtgctcacggaaaacgagggagcagccaaggcattgttcttaccggtttatgaattggctacttcctcgttttccgtaaacacgcttcccgagcttctaaacggtgtgtttcttgcaaaaactttat

SEQ ID NO: 258 - DNA, 237 bp, Oryza sativa
gacgccgcactgccgatttccccctcgggcgagccatcggagcgggggccgttggctcccaaagcagacgcgagaattcactgaaattaccgcgccatcttatctccgcaagttgaagaatataattcgggcgcagtaatttttagtgaattcatgtgtctactactacatatgtctgcttgggagccaaccgcgtttcgatggctcgcctgaggggaaatcggcgggaggcgtttg

SEQ ID NO: 259 - DNA, 105 bp, Zea mays
caggatgtgcacctgcatttctgggcaacttctcctttggcagatgcgcgagaatgtgccactgctgccaaaggaaatttgccccggaattcatctgcacaagca

SEQ ID NO: 260 - DNA, 125 bp, Aquilegia caerulea
agagatgagagatatgttgacagaagagagagagcacaacccatcatcagctaaagagagtcttttcttttgttgggagtgtgctctttgctcttctgtcatcatcaccaaatctctctctctct

SEQ ID NO: 261 - DNA, 180 bp, Arabidopsis thaliana
ccattttcgaaagccttgagagagagaacacagacgataccaactttcttcaatctcgttgccgcagtataattatctcattcctcggatatatctctccttctgcggcggcgacaagaagctacaagaataaaaagtctgttttctctcttttcaagaaaccacttacttcgaaaatgg

SEQ ID NO: 262 - DNA, 130 bp, Medicago truncatula
agaggtagagagagtatatttgagccaggatgacttgccggcatttgctgtaaatgtagaagaatcccttctcacaattaaggtgttgttggcgaggaatctaggctcatatttgctctctttccactca

SEQ ID NO: 263 - DNA, 97 bp, Medicago truncatula
gagttcctttgaacgcttcatgcatgagaatatctatttggtctaatatccattagaaaagatagtcttttcttctatgaagtgtttgggggaactc

SEQ ID NO: 264 - DNA, 120 bp, Oryza sativa
gagttctcctcaaatcacttcagtagatagctagctaggcttcattgcattacactgttacaaaactgtgagcatggggccaaaagctagttgtatatagtgaagtgtttgggggaactc

SEQ ID NO: 265 - DNA, 95 bp, Populus euphratica
tcccagtcccgaacccgtcggctgtcggtggactgctcgagctgctcccgcggcaagagcgggtcgtcgcgtgccggccgggggacgggctggga

SEQ ID NO: 266 - DNA, 104 bp, Zea mays
gtggaatgttgtctggttcaaggtcttttgctttgtgatccatctgtgtagagcttctaagtattccttggatctgcaagatctcggaccaggcttcattcccc

SEQ ID NO: 267 - DNA, 134 bp, Zea mays
atgaggtagagaacgggatgcagccaaggatgacttgccggctcctggaacctggaggcgtctcagcttgctgtgctgtggcttagaacttagtcggcaagtctgtccttggctacacctagttctcttcctct

SEQ ID NO: 268 - DNA, 143 bp, Zea mays
gtcattgagcgcagcgttgatgatgcggagcatgtacgtcttcccgggcttcactttcagcttgaacgtgtctgcgtgcatgcatatcataagtatggatatgagttagtataaagaatcatagccgttagcgctcattaact

SEQ ID NO: 269 - DNA, 141 bp, Zea mays
gtcattgagcgcagcgttgatgatgcggagcatgtacgtcttcccgggcttcactttcagcttgaacgtgtctggtgcatgcatatcataagtatggatatgagttagtataaagaatcatagccgttagcgctcattaac

SEQ ID NO: 270 - DNA, 108 bp, Zea mays
gggggcggactgggaacacatgggaatgagatgagatcattgctcggtcgtgctggcctgggccgtcggcgcgcgttgatcttgcatgtgttctcaggtcgcccccgg

SEQ ID NO: 271 - DNA, 68 bp, Zea mays
agggcaaccccccgttggcaggtgcgacggcgacgtacccctaccctgccaaaggggatttgcccggc

SEQ ID NO: 272 - DNA, 157 bp, Arabidopsis lyrata
gatgatgcatggttggattacagggcaaatactccattggcagatagttttcgctacatctatattatttgttattatatgggtgaatcaatgtatgaaaaatactttactgccaaaggagatttgccccgcaatttgttccatgcaaaagaacatc

SEQ ID NO: 273 - DNA, 127 bp, Arabidopsis lyrata
gcatggttggattacagggcaaatactccattggcagatagttttcgttgcatctatattattgattatcgatgtatgaaaaattctttactgccaaaggagatttgccccgcaattcatcccgtgc

SEQ ID NO: 274 - DNA, 135 bp, Arabidopsis lyrata
gagagataatgtatggttggattactgggcgaatactcctatggcagatagctttgcctagatatgcaagcaaaatgcttctctgccaaaggagatttgccccgcaattcatccatgcaaaacaatacatctttc

SEQ ID NO: 275 - DNA, 167 bp, Arabidopsis lyrata
atgaaagatacatagagaaggtgcaaatacattacagggcaagatcaccattggcagaaatctattacttcattcttgcataatatgcattaatgtttgtggtgagctctctgccaaaggagatttgccctgtaattctcttgcgccaatgttttagatatcttcat

SEQ ID NO: 276 - DNA, 154 bp, Arabidopsis lyrata
catgtaagctcacaagttttagggcgcctctccattggcaggtcctttatttccaaatatacacatacatatatgaatatagaaaatttcgatttatatatgacctgccaaaggagagttgccctgaaactggttcagcttaattaaacacatg

SEQ ID NO: 277 - DNA, 125 bp, Arabidopsis lyrata
taagcggagcagtaatagggcatctttctattggcaggagactcggctatttgtatcttttgtgttcttggctattggctatgtcacttgccaaaggagagttgccctgtcactacttccgctta

SEQ ID NO: 278 - DNA, 106 bp, Arabidopsis lyrata
attacagggcaagatctctattggcaggaaaccattacttgacctttgcatctctttatgcattgctttgtagtgagttcttgccaaaggagatttgcccggtaat

SEQ ID NO: 279 - DNA, 207 bp, Zea mays
tgcttgctgagcatgaattacagggtacgtctcctttggcacagcagaatgcacacatcatcagtcgagagagtaagctcgctgcgtgctcgccggcctgggagcggaagtcgcaggccaaatggcggcggtgcagatgcatgaacagcagctgccgtatatatgcgtgccaaaggagaattgccctgcgattctaggctcagcgat

SEQ ID NO: 280 - DNA, 68 bp, Zea mays; identical to SEQ ID NO: 271

SEQ ID NO: 281 - DNA, 175 bp, Zea mays
aggcagctctcctctggcaggcaggcgcgcggtcatcgtcgccatcgacgacggttgcttggctctgctatgctgtgttcgttcgtccatggtgtgctagctagccgtgcatgcattgcagtgtaacatgcgtgcatgcacgcgcgtacgtcctgccaaaggagagttgccctgc

SEQ ID NO: 282 - DNA, 162 bp, Arabidopsis lyrata
catgtgagatggatcaaaggtggaaatgtattacagggtaagatctctattggcaggaaaccattacttagatctttgcatctctttatgcattgcttttaagtgagttctctgccaaaggagatttgcccggtaattcttctgcaccaatatattgatatg

SEQ ID NO: 283 - DNA, 191 bp, Arabidopsis lyrata
agtgagagaggaaaacagagattatgttttggtagaaagcattacagggcgaatcctctattggcaggggaagttgatgagtgttgatcactcttatattttctcatcattttcctctgccaaaggagatttgcctcgcaatgcttccctaccgttatggcgttattcatttctccaatgtccaatctact

SEQ ID NO: 284 - DNA, 122 bp, Zea mays
gtagctcagggtgcgaatcacagtgcagctctcctctggcatgaaggctgtgagagaggcatgacaatttctggccttgccctgccaaaggagagctgtcctgccattcattagccctgcaa

SEQ ID NO: 285 - DNA, 94 bp, Zea mays
agtgcagttctcctctggcacgaaccaaggctgagcagcttgccccatggctagcccacgacggcccttccttgccaaaggagaattgccctgc

SEQ ID NO: 286 - DNA, 123 bp, Zea mays
tgtgaagagggtgagaatcacagtgcggttctcctctggcacgaaggctggccagagcagcttatattgccaccacccttccttgccaaaggagaattgccctgccattcacaaccctgcaat

SEQ ID NO: 287 - DNA, 124 bp, Zea mays
atgcctaagctgtccagtttcagggcttctctttcttggcagggaagcatgagatgccatagctctctgctctcttcaaccctctgccaaaggagagttgccctgtaacaggactcagcttatg

SEQ ID NO: 288 - DNA, 91 bp, Zea mays
agtgcggctctcctctggcatgagggcgcgactgagaggcacgaacagtttctggccttctcctgccaatgccaaaggagagttgccctgc

SEQ ID NO: 289 - DNA, 125 bp, Zea mays
tcaaggtgagaatcacagtgtggctctcctctggcatgaaggcgcggctgagaggcacgaacagtttctggccttcccctgccaatgccaaaggagagctgccctgccattcgttagccctgcaa

SEQ ID NO: 290 - DNA, 116 bp, Zea mays
gtggaatgttgtctggttcaaggtcttgctwtccgatttgaggatgatccatgcttgcatgtgtagttttttttgttcctcagatctacaagatctcggaccaggcttcattcccc

SEQ ID NO: 291 - DNA, 104 bp, Zea mays; identical to SEQ ID NO: 266

SEQ ID NO: 292 - DNA, 167 bp, Arabidopsis lyrata
ggggttttctcttttgaggggaatgttgtctggctcgaggactctggctcgctctattcatgttggatctttttcgatctaataatcgaattgaacctccagatttcagatctgactagggttttagcgtcgtcggaccaggcttcattccccccaattgttgctcc

SEQ ID NO: 293 - DNA, 121 bp, Arabidopsis lyrata
ggttgagaggaatgttgtctggctcgaggtcatgaaggagaggatatcactccaattaatttggaagaacgaattaagaaaccctaaatgattctcggaccaggcttcattccccctaacc

SEQ ID NO: 294 - DNA, 113 bp, Arabidopsis lyrata
ggttgagaggaatgttgtctggctcgaggtcatgaagaagatcattagattgattcatcttaaagaatgaaaaccctaaatgattctcggaccaggcttcattccccccaacc

SEQ ID NO: 295 - DNA, 177 bp, Citrus sinensis
ggggagctttttgttttgaggggaatgttgtctggctcgaggacactacttgttgatccattaattttacgtattctctcatagatctagcatctgaatggtggataacaatatacggattcagcttatttggcgtcgtcggaccaggcttcattccccccaatatattgcttctat

SEQ ID NO: 296 - DNA, 92 bp, Zea mays
ggggaatgttgtctggctcgaggtgcagaaacacgcagatctcatcgaggtcgtcttggttgttgttgatctcggaccaggcttcattcccc

SEQ ID NO: 297 - DNA, 154 bp, Zea mays
caagttgaagattaggttaaggggtttgtttgtctggttcaaggtcgccacacagcagggaaaacccatttcgccttgaagcatgcaccatgatgggtgtacctgttggtgatctcggaccaggcttcaatccctttaactagcgtctgcatat

SEQ ID NO: 298 - DNA, 148 bp, Arabidopsis lyrata
agagggatttttcttttgaggggactgttgtctggctcgaggtctcttattctaatacaatctcatttcaatagtctcagatctgatgattgattagggttttagcatctcggaccaggcttcattccccccaattattactccctct

SEQ ID NO: 299 - DNA, 200 bp, Arabidopsis lyrata
gagtccatgttcttcagtgaagctttttcttttgaggggaatgttgtctggcacgaggcccttaacttagatctatatttgattttatgtctcttctttatttattagtctatatatacatgaatgatcgattttaacggttaatgacgtcggaccaggcttcattcccctcaattatatcgcttcttcgatcttggctt

SEQ ID NO: 300 - DNA, 131 bp, Arabidopsis lyrata
ggaagcgatttagggtttagaggaatgttgtttggctcgaggtcatggagagtaattcgttaccaaaacacaaaactctaaatgattctcggaccaggcttcattcccctcaacctattttatcgcatttt

SEQ ID NO: 301 - DNA, 213 bp, Zea mays
tgaggggaatgttgtctggctcggggccgccgccgccgctccttccttctctagtctctcttctctcctagcagctactcttcgcttcctactcctatctcgatccctctcttcttcttcttcttcttcttcctcttcccccctctcttggatcgagaccgagcggacggagacgagtggtgtagatctcggaccaggcttcattccccccaa

SEQ ID NO: 302 - DNA, 126 bp, Zea mays
ggggaatgttgtctggttggagacctaacaccrcgaattaatcatccatgccatggaagcagcatatgcccgcctgcatctatccatgcatgatggtggaaggtttcggaccaggcttcattcccc

SEQ ID NO: 303 - DNA, 156 bp, Zea mays
tccttggtctgggggtttgtggggaatgttggctggctcgaggcatccgcgtcctggctcgcagtcgcagcgcagatcgtgttttgcctgctaccggccggacagatcgagaggcgtcggaccaggcttcattcctcgcaaaccggtgcatcccca

SEQ ID NO: 304 - DNA, 168 bp, Zea mays
gcatgctcgggttaggtcagggggattgttgtctggctcggggtctccggtcgagatcgattcataacatatacgtacgtgcttctagccttgccggcggagctagtcgttgtcgtcgaccggagatttcggaccaggcttcaatccctttgaccatgcggcattagg

SEQ ID NO: 305 - DNA, 83 bp, Zea mays
ggggaatgtcgtctggcgcgagaccgtaccagacgacgtgctctctcggtcgtcggacggtctcggaccaggcttcattcccc

SEQ ID NO: 306 - DNA, 96 bp, Zea mays
gggattgttgtctggctcggtgtctccggtcgagayggccttgccggcgccggagctgtcgtcgaccggagatctcggaccaggcttcaatccctt

SEQ ID NO: 307 - DNA, 105 bp, Arabidopsis lyrata
aagttcaggtgaatgatgcctggctcgagaccattccatctcatgatcatgatgatgatataatgatgatgatgatgtcggaccaggcttcattcccctcaactt

SEQ ID NO: 308 - DNA, 137 bp, Zea mays
aaagaacgggaggagggtttctggaatggaggctggtccaagatccttaggtgttaaagcattatattgccttgtttctggttttgtgtttgagatctcggaccaggcttcattcctcaaacccacgctcccgacac

SEQ ID NO: 309 - DNA, 76 bp, Zea mays
ggggaatgacgtccggtccgaacgagccacggctgctgctgcgccgccgcgggcttcggaccaggcttcattcccc

SEQ ID NO: 310 - DNA, 140 bp, Zea mays
gggggcgaactgagaacacatgagaataatgagatgagattgctcgcctcgcggtacggttcgtgctggcctggaccaccgtcgtcgccgttcatcttgtacgcataataatgctgcatgtgttctcaggtcgcccccgc

SEQ ID NO: 311 - DNA, 93 bp, Aquilegia caerulea
gggggtaacatgagaatacatgaaatagatactatcagagagtcattccattgtagtatcagtttcttccatgtgttctcaggtcgcccctgc

SEQ ID NO: 312 - DNA, 150 bp, Brachypodium distachyon
aagaacagacagcacatgcgaggaagttcctgcagggtcgaattgggaacacatgagatggatggtccgctgagctctgagctcgagctcggccatgtgttctcaggtcgcccctgttgggtcttccgtgccatggattgatgattgcct

SEQ ID NO: 313 - DNA, 131 bp, Brachypodium distachyon
cagcacatgcgaggaagttcctgcagggtcgaattgggaacacatgagatggatggtccgctgagctctgagctcgagctcggccatgtgttctcaggtcgcccctgttgggtcttccgtgccatggattg

SEQ ID NO: 314 - DNA, 87 bp, Medicago truncatula
ttctacagggtcgacatgagaccacatgaagctatcatatttgtctatgttatccaactcatgtgttctcaggtcgcccctgctgaa

SEQ ID NO: 315 - DNA, 87 bp, Medicago truncatula
ttccacagggccgacccgagaccacatgaagttatcatatgtgtctaagctacacatctcgtgtgttctcaggtcgcccctgctgaa

SEQ ID NO: 316 - DNA, 88 bp, Oryza sativa
ggagttcctacaggggcgagctgggaacacacggtgatgaggcggtctggtctttcgtgtgttctcaggtcgcccctgccgggactct

SEQ ID NO: 317 - DNA, 85 bp, Populus trichocarpa
agggttccgacaggagcggccttgggtcacatgtggcggcatccaatgtacttcatgtgttctcaggtcgcccctgccgggcttc

SEQ ID NO: 318 - DNA, 97 bp, Populus trichocarpa
aggattcctacaggagcgacctgaaatcacatgtgggctgcaccctcctgggttatcttgagcaacatgtgttctcaggtcgcccctgccgggcttt

SEQ ID NO: 319 - DNA, 126 bp, Ricinus communis
ctacaggagcgacctgagaatcacatgtggacattcttagctatatatacccttatcatcttctcttattttgggtttattgtactttggtgttctttcatgtgttctcaggtcgcccctgccggg

SEQ ID NO: 320 - DNA, 109 bp, Sorghum bicolor
gggggcggactgggaacacatgggaatgagagatgagattgctcggtcgtgctggccctgggctcgtagttgatctgcttgtatgcatgtgttctcaggtcgcccccgc

SEQ ID NO: 321 - DNA, 120 bp, Triticum aestivum
agacgcgaggaaattcctgcggggtcgaactgggaacacatgggatacgaaccgcttgattgaggagcgactcttatcaactcatgtgttctcaggtcgcccccgctggagcctcctcgc

SEQ ID NO: 322 - DNA, 125 bp, Theobroma cacao
ttaatggtggaggagcccaacaggagcgacatgagaacacatgtggccactcttgaaggacaaaccttatcctgtgtgttttgatgtgttctcaggtcgcccctgcagggctttccttcaccttc

SEQ ID NO: 323 - DNA, 88 bp, Vitis vinifera
gtgtcctacaggtgtgacctgagaatcacatgcccgcaccacccatctttgctctcatgtgttctcaggtcgcccctgctggactccc

SEQ ID NO: 324 - DNA, 88 bp, Vitis vinifera
gtgtcctacaggagtgacctgagaatcacatgcccgcatcacccatctttgctctcatgtgttctcaggtcgcccctgctggactccc

SEQ ID NO: 325 - DNA, 140 bp, Zea mays; identical to SEQ ID NO: 310

SEQ ID NO: 326 - DNA, 108 bp, Zea mays; identical to SEQ ID NO: 270

SEQ ID NO: 327 - DNA, 22 bp, Artificial sequence
  Single strand DNA oligonucleotide
cgaagggaattgagggggctag

SEQ ID NO: 328 - DNA, 22 bp, Artificial sequence
  Single strand DNA oligonucleotide
gaggagacctggaggagacgct

SEQ ID NO: 329 - DNA, 24 bp, Artificial sequence
  Single strand DNA oligonucleotide
cgaggaggagaagcaacacatagg

SEQ ID NO: 330 - DNA, 24 bp, Artificial sequence
  Single strand DNA oligonucleotide
gggattggaggggattgaggtgga

SEQ ID NO: 331 - DNA, 24 bp, Artificial sequence
  Single strand DNA oligonucleotide
gaggaggggattcgacgaaatgga

SEQ ID NO: 332 - DNA, 21 bp, Artificial sequence
  Single strand DNA oligonucleotide
agaagagagagagcacaaccc

SEQ ID NO: 333 - DNA, 22 bp, Artificial sequence
  Single strand DNA oligonucleotide
cttgagagagagaacacagacg

SEQ ID NO: 334 - DNA, 21 bp, Artificial sequence
  Single strand DNA oligonucleotide
tgagccaggatgacttgccgg

SEQ ID NO: 335 - DNA, 21 bp, Artificial sequence
  Single strand DNA oligonucleotide
attcacggggacgaacctcct

SEQ ID NO: 336 - DNA, 21 bp, Artificial sequence
  Single strand DNA oligonucleotide
atgaagtgtttgggggaactc

SEQ ID NO: 337 - DNA, 21 bp, Artificial sequence
  Single strand DNA oligonucleotide
tggtgagccttcctggctaag

SEQ ID NO: 338 - DNA, 24 bp, Artificial sequence
  Single strand DNA oligonucleotide
tcacggaaaacgagggagcagcca

SEQ ID NO: 339 - DNA, 21 bp, Artificial sequence
  Single strand DNA oligonucleotide
cctgaggggaaatcggcggga

SEQ ID NO: 340 - DNA, 21 bp, Artificial sequence
  Single strand DNA oligonucleotide
gtgaagtgtttgggggaactc

SEQ ID NO: 341 - DNA, 20 bp, Artificial sequence
  Single strand DNA oligonucleotide
ggccgggggacgggctggga

SEQ ID NO: 342 - DNA, 24 bp, Artificial sequence
  Single strand DNA oligonucleotide
aaaaaagactgagccgaattgaaa

SEQ ID NO: 343 - DNA, 24 bp, Artificial sequence
  Single strand DNA oligonucleotide
aactaaaacgaaacggaaggagta

SEQ ID NO: 344 - DNA, 24 bp, Artificial sequence
  Single strand DNA oligonucleotide
aaggagtttaatgaagaaagagag

SEQ ID NO: 345 - DNA, 24 bp, Artificial sequence
  Single strand DNA oligonucleotide
aaggtgcttttaggagtaggacgg

SEQ ID NO: 346 - DNA, 24 bp, Artificial sequence
  Single strand DNA oligonucleotide
acaaaggaattagaacggaatggc

SEQ ID NO: 347 - DNA, 24 bp, Artificial sequence
  Single strand DNA oligonucleotide
actgatgacgacactgaggaggct

SEQ ID NO: 348 - DNA, 24 bp, Artificial sequence
  Single strand DNA oligonucleotide
agaatcaggaatggaacggctccg

SEQ ID NO: 349 - DNA, 24 bp, Artificial sequence
  Single strand DNA oligonucleotide
agaatcagggatggaacggctcta

SEQ ID NO: 350 - DNA, 24 bp, Artificial sequence
  Single strand DNA oligonucleotide
agaggaaccagagccgaagccgtt

SEQ ID NO: 351 - DNA, 24 bp, Artificial sequence
  Single strand DNA oligonucleotide
agagtcacgggcgagaagaggacg

SEQ ID NO: 352 - DNA, 24 bp, Artificial sequence
  Single strand DNA oligonucleotide
aggacctagatgagcgggcggttt

SEQ ID NO: 353 - DNA, 24 bp, Artificial sequence
  Single strand DNA oligonucleotide
aggacgctgctggagacggagaat

SEQ ID NO: 354 - DNA, 24 bp, Artificial sequence
  Single strand DNA oligonucleotide
aggcaaggtggaggacgttgatga

SEQ ID NO: 355 - DNA, 24 bp, Artificial sequence
  Single strand DNA oligonucleotide
agggctgatttggtgacaagggga

SEQ ID NO: 356 - DNA, 24 bp, Artificial sequence
  Single strand DNA oligonucleotide
agggcttgttcggtttgaaggggt

SEQ ID NO: 357 - DNA, 24 bp, Artificial sequence
  Single strand DNA oligonucleotide
atataaagggaggaggtatggacc

SEQ ID NO: 358 - DNA, 24 bp, Artificial sequence
  Single strand DNA oligonucleotide
atcggtcagctggaggagacaggt

SEQ ID NO: 359 - DNA, 24 bp, Artificial sequence
  Single strand DNA oligonucleotide
atctttcaacggctgcgaagaagg

SEQ ID NO: 360 - DNA, 24 bp, Artificial sequence
  Single strand DNA oligonucleotide
atggtaagagactatgatccaact

SEQ ID NO: 361 - DNA, 24 bp, Artificial sequence
  Single strand DNA oligonucleotide
caattttgtactggatcggggcat

SEQ ID NO: 362 - DNA, 24 bp, Artificial sequence
  Single strand DNA oligonucleotide
cagaggaaccagagccgaagccgt

SEQ ID NO: 363 - DNA, 24 bp, Artificial sequence
  Single strand DNA oligonucleotide
cggctggacagggaagaagagcac

SEQ ID NO: 364 - DNA, 24 bp, Artificial sequence
  Single strand DNA oligonucleotide
ctagaattagggatggaacggctc

SEQ ID NO: 365 - DNA, 24 bp, Artificial sequence
  Single strand DNA oligonucleotide
gaaacttggagagatggaggcttt

SEQ ID NO: 366 - DNA, 24 bp, Artificial sequence
  Single strand DNA oligonucleotide
gagagagaagggagcggatctggt

SEQ ID NO: 367 - DNA, 24 bp, Artificial sequence
  Single strand DNA oligonucleotide
gagggataactggggacaacacgg

SEQ ID NO: 368 - DNA, 24 bp, Artificial sequence
  Single strand DNA oligonucleotide
gcggagtgggatggggagtgttgc

SEQ ID NO: 369 - DNA, 24 bp, Artificial sequence
  Single strand DNA oligonucleotide
gctgcacgggattggtggagaggt

SEQ ID NO: 370 - DNA, 24 bp, Artificial sequence
  Single strand DNA oligonucleotide
ggagacggatgcggagactgctgg

SEQ ID NO: 371 - DNA, 24 bp, Artificial sequence
  Single strand DNA oligonucleotide
ggctgctggagagcgtagaggacc

SEQ ID NO: 372 - DNA, 24 bp, Artificial sequence
  Single strand DNA oligonucleotide
gggttttgagagcgagtgaagggg

SEQ ID NO: 373 - DNA, 24 bp, Artificial sequence
  Single strand DNA oligonucleotide
ggtattggggtggattgaggtgga

SEQ ID NO: 374 - DNA, 24 bp, Artificial sequence
  Single strand DNA oligonucleotide
ggtggcgatgcaagaggagctcaa

SEQ ID NO: 375 - DNA, 24 bp, Artificial sequence
  Single strand DNA oligonucleotide
ggttaggagtggattgagggggat

SEQ ID NO: 376 - DNA, 24 bp, Artificial sequence
  Single strand DNA oligonucleotide
gtcaagtgactaagagcatgtggt

SEQ ID NO: 377 - DNA, 24 bp, Artificial sequence
  Single strand DNA oligonucleotide
gtggaatggaggagattgagggga

SEQ ID NO: 378 - DNA, 24 bp, Artificial sequence
  Single strand DNA oligonucleotide
gttgctggagagagtagaggacgt

SEQ ID NO: 379 - DNA, 24 bp, Artificial sequence
  Single strand DNA oligonucleotide
tggctgaaggcagaaccaggggag

SEQ ID NO: 380 - DNA, 24 bp, Artificial sequence
  Single strand DNA oligonucleotide
tgtggtagagaggaagaacaggac

SEQ ID NO: 381 - DNA, 24 bp, Artificial sequence
  Single strand DNA oligonucleotide
agggactctctttatttccgacgg

SEQ ID NO: 382 - DNA, 24 bp, Artificial sequence
  Single strand DNA oligonucleotide
agggttcgtttcctgggagcgcgg

SEQ ID NO: 383 - DNA, 24 bp, Artificial sequence
  Single strand DNA oligonucleotide
tcctagaatcagggatggaacggc

SEQ ID NO: 384 - DNA, 24 bp, Artificial sequence
  Single strand DNA oligonucleotide
tgggagctctctgttcgatggcgc

SEQ ID NO: 385 - DNA, 22 bp, Artificial sequence
  Single strand DNA oligonucleotide
catcgctcaacggacaaaaggt

SEQ ID NO: 386 - DNA, 24 bp, Artificial sequence
  Single strand DNA oligonucleotide
aagaaacggggcagtgagatggac

SEQ ID NO: 387 - DNA, 25 bp, Artificial sequence
  Single strand DNA oligonucleotide
agaaaagattgagccgaattgaatt

SEQ ID NO: 388 - DNA, 24 bp, Artificial sequence
  Single strand DNA oligonucleotide
aagacgaaggtagcagcgcgatat

SEQ ID NO: 389 - DNA, 22 bp, Artificial sequence
  Single strand DNA oligonucleotide
agagcctgtagctaatggtggg

SEQ ID NO: 390 - DNA, 24 bp, Artificial sequence
  Single strand DNA oligonucleotide
agccagactgatgagagaaggagg

SEQ ID NO: 391 - DNA, 24 bp, Artificial sequence
  Single strand DNA oligonucleotide
aggtagcggcctaagaacgacaca

SEQ ID NO: 392 - DNA, 24 bp, Artificial sequence
  Single strand DNA oligonucleotide
acgttgttggaagggtagaggacg

SEQ ID NO: 393 - DNA, 21 bp, Artificial sequence
  Single strand DNA oligonucleotide
caagttatgcagttgctgcct

SEQ ID NO: 394 - DNA, 21 bp, Artificial sequence
  Single strand DNA oligonucleotide
catgtgttctcaggtcgcccc

SEQ ID NO: 395 - DNA, 24 bp, Artificial sequence
  Single strand DNA oligonucleotide
cctatatactggaacggaacggct

SEQ ID NO: 396 - DNA, 22 bp, Artificial sequence
  Single strand DNA oligonucleotide
cagaatggaggaagagatggtg

SEQ ID NO: 397 - DNA, 24 bp, Artificial sequence
  Single strand DNA oligonucleotide
atctgtggagagagaaggttgccc

SEQ ID NO: 398 - DNA, 22 bp, Artificial sequence
  Single strand DNA oligonucleotide
atgtcagggggccatgcagtat

SEQ ID NO: 399 - DNA, 24 bp, Artificial sequence
  Single strand DNA oligonucleotide
ctatatactggaacggaacggctt

SEQ ID NO: 400 - DNA, 24 bp, Artificial sequence
  Single strand DNA oligonucleotide
atcctgactgtgccgggccggccc

SEQ ID NO: 401 - DNA, 24 bp, Artificial sequence
  Single strand DNA oligonucleotide
gacgagatcgagtctggagcgagc

SEQ ID NO: 402 - DNA, 22 bp, Artificial sequence
  Single strand DNA oligonucleotide
gagtatggggagggactaggga

SEQ ID NO: 403 - DNA, 22 bp, Artificial sequence
  Single strand DNA oligonucleotide
cgagttcgccgtagagaaagct

SEQ ID NO: 404 - DNA, 24 bp, Artificial sequence
  Single strand DNA oligonucleotide
gactgattcggacgaaggagggtt

SEQ ID NO: 405 - DNA, 23 bp, Artificial sequence
  Single strand DNA oligonucleotide
gtctgaacactaaacgaagcaca

SEQ ID NO: 406 - DNA, 24 bp, Artificial sequence
  Single strand DNA oligonucleotide
gacgttgttggaagggtagaggac

SEQ ID NO: 407 - DNA, 24 bp, Artificial sequence
  Single strand DNA oligonucleotide
gacgaaatagaggctcaggagagg

SEQ ID NO: 408 - DNA, 22 bp, Artificial sequence
  Single strand DNA oligonucleotide
ggattcgtgattggcgatgggg

SEQ ID NO: 409 - DNA, 24 bp, Artificial sequence
  Single strand DNA oligonucleotide
ggtgagaaacggaaaggcaggaca

SEQ ID NO: 410 - DNA, 24 bp, Artificial sequence
  Single strand DNA oligonucleotide
gctactgtagttcacgggccggcc

SEQ ID NO: 411 - DNA, 24 bp, Artificial sequence
  Single strand DNA oligonucleotide
gtgtctgagcagggtgagaaggct

SEQ ID NO: 412 - DNA, 24 bp, Artificial sequence
  Single strand DNA oligonucleotide
gttttggaggcgtaggcgagggat

SEQ ID NO: 413 - DNA, 21 bp, Artificial sequence
  Single strand DNA oligonucleotide
tgggacgctgcatctgttgat

SEQ ID NO: 414 - DNA, 24 bp, Artificial sequence
  Single strand DNA oligonucleotide
tctatatactggaacggaacggct

SEQ ID NO: 415 - DNA, 25 bp, Artificial sequence
  Single strand DNA oligonucleotide
ggtattcgtgagcctgtttctggtt

SEQ ID NO: 416 - DNA, 24 bp, Artificial sequence
  Single strand DNA oligonucleotide
gttgttggaggggtagaggacgtc

SEQ ID NO: 417 - DNA, 22 bp, Artificial sequence
  Single strand DNA oligonucleotide
tggaaggagcatgcatcttgag

SEQ ID NO: 418 - DNA, 24 bp, Artificial sequence
  Single strand DNA oligonucleotide
aatgacaggacgggatgggacggg

SEQ ID NO: 419 - DNA, 24 bp, Artificial sequence
  Single strand DNA oligonucleotide
acggaacggcttcataccacaata

SEQ ID NO: 420 - DNA, 21 bp, Artificial sequence
  Single strand DNA oligonucleotide
ttcttgaccttgtaagaccca

SEQ ID NO: 421 - DNA, 22 bp, Artificial sequence
  Single strand DNA oligonucleotide
agcagaatggaggaagagatgg

SEQ ID NO: 422 - DNA, 24 bp, Artificial sequence
  Single strand DNA oligonucleotide
ctggacactgttgcagaaggagga

SEQ ID NO: 423 - DNA, 24 bp, Artificial sequence
  Single strand DNA oligonucleotide
gacgggccgacatttagagcacgg

SEQ ID NO: 424 - DNA, 24 bp, Artificial sequence
  Single strand DNA oligonucleotide
gaaataggataggaggagggatga

SEQ ID NO: 425 - DNA, 24 bp, Artificial sequence
  Single strand DNA oligonucleotide
ggcacgactaacagactcacgggc

SEQ ID NO: 426 - DNA, 19 bp, Artificial sequence
  Single strand DNA oligonucleotide
aatcccggtggaacctcca

SEQ ID NO: 427 - DNA, 24 bp, Artificial sequence
  Single strand DNA oligonucleotide
acacgacaagacgaatgagagaga

SEQ ID NO: 428 - DNA, 18 bp, Artificial sequence
  Single strand DNA oligonucleotide
acggataaaaggtactct

SEQ ID NO: 429 - DNA, 22 bp, Artificial sequence
  Single strand DNA oligonucleotide
agtatgtcgaaaactggagggc

SEQ ID NO: 430 - DNA, 19 bp, Artificial sequence
  Single strand DNA oligonucleotide
ataagcaccggctaactct

SEQ ID NO: 431 - DNA, 24 bp, Artificial sequence
  Single strand DNA oligonucleotide
attcagcgggcgtggttattggca

SEQ ID NO: 432 - DNA, 20 bp, Artificial sequence
  Single strand DNA oligonucleotide
acgacgaggacttcgagacg

SEQ ID NO: 433 - DNA, 20 bp, Artificial sequence
  Single strand DNA oligonucleotide
cagcgggtgccatagtcgat

SEQ ID NO: 434 - DNA, 19 bp, Artificial sequence
  Single strand DNA oligonucleotide
caaagtggtcgtgccggag

SEQ ID NO: 435 - DNA, 20 bp, Artificial sequence
  Single strand DNA oligonucleotide
tttgcgacacgggctgctct

SEQ ID NO: 436 - DNA, 18 bp, Artificial sequence
  Single strand DNA oligonucleotide
cattgcgacggtcctcaa

SEQ ID NO: 437 - DNA, 20 bp, Artificial sequence
  Single strand DNA oligonucleotide
cagcttgagaatcgggccgc

SEQ ID NO: 438 - DNA, 19 bp, Artificial sequence
  Single strand DNA oligonucleotide
ccctgtgacaagaggagga

SEQ ID NO: 439 - DNA, 23 bp, Artificial sequence
  Single strand DNA oligonucleotide
cctgctaactagttatgcggagc

SEQ ID NO: 440 - DNA, 19 bp, Artificial sequence
  Single strand DNA oligonucleotide
cgaactcagaagtgaaacc

SEQ ID NO: 441 - DNA, 19 bp, Artificial sequence
  Single strand DNA oligonucleotide
ctcaacggataaaaggtac

SEQ ID NO: 442 - DNA, 21 bp, Artificial sequence
  Single strand DNA oligonucleotide
cgcttcgtcaaggagaagggc

SEQ ID NO: 443 - DNA, 19 bp, Artificial sequence
  Single strand DNA oligonucleotide
gacagtcaggatgttggct

SEQ ID NO: 444 - DNA, 22 bp, Artificial sequence
  Single strand DNA oligonucleotide
gactgatccttcggtgtcggcg

SEQ ID NO: 445 - DNA, 24 bp, Artificial sequence
  Single strand DNA oligonucleotide
gccgaagattaaaagacgagacga

SEQ ID NO: 446 - DNA, 20 bp, Artificial sequence
  Single strand DNA oligonucleotide
gcctttgccgaccatcctga

SEQ ID NO: 447 - DNA, 22 bp, Artificial sequence
  Single strand DNA oligonucleotide
ggaatcgctagtaatcgtggat

SEQ ID NO: 448 - DNA, 26 bp, Artificial sequence
  Single strand DNA oligonucleotide
cttaactgggcgttaagttgcagggt

SEQ ID NO: 449 - DNA, 20 bp, Artificial sequence
  Single strand DNA oligonucleotide
ggagcagctctggtcgtggg

SEQ ID NO: 450 - DNA, 21 bp, Artificial sequence
  Single strand DNA oligonucleotide
ggaggctcgactatgttcaaa

SEQ ID NO: 451 - DNA, 22 bp, Artificial sequence
  Single strand DNA oligonucleotide
ggagggatgtgagaacatgggc

SEQ ID NO: 452 - DNA, 20 bp, Artificial sequence
  Single strand DNA oligonucleotide
ggacgaacctctggtgtacc

SEQ ID NO: 453 - DNA, 19 bp, Artificial sequence
  Single strand DNA oligonucleotide
ggcgctggagaactgaggg

SEQ ID NO: 454 - DNA, 19 bp, Artificial sequence
  Single strand DNA oligonucleotide
gtccccttcgtctagaggc

SEQ ID NO: 455 - DNA, 20 bp, Artificial sequence
  Single strand DNA oligonucleotide
gtctgagtggtgtagttggt

SEQ ID NO: 456 - DNA, 19 bp, Artificial sequence
  Single strand DNA oligonucleotide
gggggcctaaataaagact

SEQ ID NO: 457 - DNA, 18 bp, Artificial sequence
  Single strand DNA oligonucleotide
gttggtagagcagttggc

SEQ ID NO: 458 - DNA, 21 bp, Artificial sequence
  Single strand DNA oligonucleotide
tacgttcccgggtcttgtaca

SEQ ID NO: 459 - DNA, 20 bp, Artificial sequence
  Single strand DNA oligonucleotide
gtgctaacgtccgtcgtgaa

SEQ ID NO: 460 - DNA, 20 bp, Artificial sequence
  Single strand DNA oligonucleotide
tatggatgaagatgggggtg

SEQ ID NO: 461 - DNA, 22 bp, Artificial sequence
  Single strand DNA oligonucleotide
tcaacggataaaaggtactccg

SEQ ID NO: 462 - DNA, 20 bp, Artificial sequence
  Single strand DNA oligonucleotide
tagcttaaccttcgggaggg

SEQ ID NO: 463 - DNA, 22 bp, Artificial sequence
  Single strand DNA oligonucleotide
tgagaaagaaagagaaggctca

SEQ ID NO: 464 - DNA, 18 bp, Artificial sequence
  Single strand DNA oligonucleotide
tgcccagtgctttgaatg

SEQ ID NO: 465 - DNA, 21 bp, Artificial sequence
  Single strand DNA oligonucleotide
tgcgagaccgacaagtcgagc

SEQ ID NO: 466 - DNA, 20 bp, Artificial sequence
  Single strand DNA oligonucleotide
tttgcgacacgggctgctct

SEQ ID NO: 467 - DNA, 22 bp, Artificial sequence
  Single strand DNA oligonucleotide
aaaagagaaaccgaagacacat

SEQ ID NO: 468 - DNA, 22 bp, Artificial sequence
  Single strand DNA oligonucleotide
aaagaggatgaggagtagcatg

SEQ ID NO: 469 - DNA, 22 bp, Artificial sequence
  Single strand DNA oligonucleotide
aacgtcgtgtcgtgcttgggct

SEQ ID NO: 470 - DNA, 21 bp, Artificial sequence
  Single strand DNA oligonucleotide
aatacacatgggttgaggagg

SEQ ID NO: 471 - DNA, 22 bp, Artificial sequence
  Single strand DNA oligonucleotide
acctggaccaatacatgagatt

SEQ ID NO: 472 - DNA, 22 bp, Artificial sequence
  Single strand DNA oligonucleotide
agaagcgacaatgggacggagt

SEQ ID NO: 473 - DNA, 22 bp, Artificial sequence
  Single strand DNA oligonucleotide
agaagcggactgccaaggaggc

SEQ ID NO: 474 - DNA, 23 bp, Artificial sequence
  Single strand DNA oligonucleotide
agagggtttggggatagagggac

SEQ ID NO: 475 - DNA, 23 bp, Artificial sequence
  Single strand DNA oligonucleotide
aggaaggaacaaacgaggataag

SEQ ID NO: 476 - DNA, 21 bp, Artificial sequence
  Single strand DNA oligonucleotide
aggatgctgacgcaatgggat

SEQ ID NO: 477 - DNA, 23 bp, Artificial sequence
  Single strand DNA oligonucleotide
caggatgtgaggctattggggac

SEQ ID NO: 478 - DNA, 21 bp, Artificial sequence
  Single strand DNA oligonucleotide
atagggatgaggcagagcatg

SEQ ID NO: 479 - DNA, 22 bp, Artificial sequence
  Single strand DNA oligonucleotide
atgctatttgtacccgtcaccg

SEQ ID NO: 480 - DNA, 22 bp, Artificial sequence
  Single strand DNA oligonucleotide
atgtggataaaaggagggatga

SEQ ID NO: 481 - DNA, 22 bp, Artificial sequence
  Single strand DNA oligonucleotide
caacaggaacaaggaggaccat

SEQ ID NO: 482 - DNA, 22 bp, Artificial sequence
  Single strand DNA oligonucleotide
ccaagagatggaagggcagagc

SEQ ID NO: 483 - DNA, 22 bp, Artificial sequence
  Single strand DNA oligonucleotide
ccaagtcgagggcagaccaggc

SEQ ID NO: 484 - DNA, 21 bp, Artificial sequence
  Single strand DNA oligonucleotide
cgacaacgggacggagttcaa

SEQ ID NO: 485 - DNA, 21 bp, Artificial sequence
  Single strand DNA oligonucleotide
ctgagttgagaaagagatgct

SEQ ID NO: 486 - DNA, 22 bp, Artificial sequence
  Single strand DNA oligonucleotide
ctgatgggaggtggagttgcat

SEQ ID NO: 487 - DNA, 23 bp, Artificial sequence
  Single strand DNA oligonucleotide
ctgggaagatggaacattttggt

SEQ ID NO: 488 - DNA, 22 bp, Artificial sequence
  Single strand DNA oligonucleotide
gaagatatacgatgatgaggag

SEQ ID NO: 489 - DNA, 21 bp, Artificial sequence
  Single strand DNA oligonucleotide
gaatctatcgtttgggctcat

SEQ ID NO: 490 - DNA, 21 bp, Artificial sequence
  Single strand DNA oligonucleotide
gacgagctacaaaaggattcg

SEQ ID NO: 491 - DNA, 22 bp, Artificial sequence
  Single strand DNA oligonucleotide
gaggatggagaggtacgtcaga

SEQ ID NO: 492 - DNA, 22 bp, Artificial sequence
  Single strand DNA oligonucleotide
gatgacgaggagtgagagtagg

SEQ ID NO: 493 - DNA, 23 bp, Artificial sequence
  Single strand DNA oligonucleotide
gatgggtaggagagcgtcgtgtg

SEQ ID NO: 494 - DNA, 22 bp, Artificial sequence
  Single strand DNA oligonucleotide
gatggttcataggtgacggtag

SEQ ID NO: 495 - DNA, 22 bp, Artificial sequence
  Single strand DNA oligonucleotide
gggagccgagacatagagatgt

SEQ ID NO: 496 - DNA, 23 bp, Artificial sequence
  Single strand DNA oligonucleotide
gggcatcttctggcaggaggaca

SEQ ID NO: 497 - DNA, 22 bp, Artificial sequence
  Single strand DNA oligonucleotide
gtgaggagtgataatgagacgg

SEQ ID NO: 498 - DNA, 23 bp, Artificial sequence
  Single strand DNA oligonucleotide
gtttggggctttagcaggtttat

SEQ ID NO: 499 - DNA, 21 bp, Artificial sequence
  Single strand DNA oligonucleotide
tacggaagaagagcaagtttt

SEQ ID NO: 500 - DNA, 22 bp, Artificial sequence
  Single strand DNA oligonucleotide
tagaaagagcgagagaacaaag

SEQ ID NO: 501 - DNA, 22 bp, Artificial sequence
  Single strand DNA oligonucleotide
tccatagctgggcggaagagat

SEQ ID NO: 502 - DNA, 21 bp, Artificial sequence
  Single strand DNA oligonucleotide
tcggcatgtgtaggataggtg

SEQ ID NO: 503 - DNA, 22 bp, Artificial sequence
  Single strand DNA oligonucleotide
tgataggctgggtgtggaagcg

SEQ ID NO: 504 - DNA, 21 bp, Artificial sequence
  Single strand DNA oligonucleotide
tgatattatggacgactggtt

SEQ ID NO: 505 - DNA, 22 bp, Artificial sequence
  Single strand DNA oligonucleotide
tgcaaacagactggggaggcga

SEQ ID NO: 506 - DNA, 21 bp, Artificial sequence
  Single strand DNA oligonucleotide
tggaagggccatgccgaggag

SEQ ID NO: 507 - DNA, 21 bp, Artificial sequence
  Single strand DNA oligonucleotide
ttgagcgcagcgttgatgagc

SEQ ID NO: 508 - DNA, 23 bp, Artificial sequence
  Single strand DNA oligonucleotide
ttggataacgggtagtttggagt

SEQ ID NO: 509 - DNA, 22 bp, Artificial sequence
  Single strand DNA oligonucleotide
tttggctgacaggataagggag

SEQ ID NO: 510 - DNA, 22 bp, Artificial sequence
  Single strand DNA oligonucleotide
ttttcatagctgggcggaagag

SEQ ID NO: 511 - DNA, 24 bp, Artificial sequence
  Single strand DNA oligonucleotide
aactttaaataggtaggacggcgc

SEQ ID NO: 512 - DNA, 21 bp, Artificial sequence
  Single strand DNA oligonucleotide
agctgccgactcattcaccca

SEQ ID NO: 513 - DNA, 21 bp, Artificial sequence
  Single strand DNA oligonucleotide
ggaatgttgtctggttcaagg

SEQ ID NO: 514 - DNA, 22 bp, Artificial sequence
  Single strand DNA oligonucleotide
tgtaatgttcgcggaaggccac

SEQ ID NO: 515 - DNA, 22 bp, Artificial sequence
  Single strand DNA oligonucleotide
tgtacgatgatcaggaggaggt

SEQ ID NO: 516 - DNA, 21 bp, Artificial sequence
  Single strand DNA oligonucleotide
tgtgttctcaggtcgcccccg

SEQ ID NO: 517 - DNA, 21 bp, Artificial sequence
  Single strand DNA oligonucleotide
tgttggcatggctcaatcaac

SEQ ID NO: 518 - DNA, 21 bp, Artificial sequence
  Single strand DNA oligonucleotide
actaaaaagaaacagagggag

SEQ ID NO: 519 - DNA, 22 bp, Artificial sequence
  Single strand DNA oligonucleotide
cgctgacgccgtgccacctcat

SEQ ID NO: 520 - DNA, 20 bp, Artificial sequence
  Single strand DNA oligonucleotide
gaccggctcgacccttctgc

SEQ ID NO: 521 - DNA, 20 bp, Artificial sequence
  Single strand DNA oligonucleotide
gcctgggcctctttagacct

SEQ ID NO: 522 - DNA, 22 bp, Artificial sequence
  Single strand DNA oligonucleotide
gtaggatggatggagagggttc

SEQ ID NO: 523 - DNA, 22 bp, Artificial sequence
  Single strand DNA oligonucleotide
ctagccaagcatgatttgcccg

SEQ ID NO: 524 - DNA, 20 bp, Artificial sequence
  Single strand DNA oligonucleotide
tcaacgggctggcggatgtg

SEQ ID NO: 525 - DNA, 22 bp, Artificial sequence
  Single strand DNA oligonucleotide
tggtaggatggatggagagggt

SEQ ID NO: 526 - DNA, 22 bp, Artificial sequence
  Single strand DNA oligonucleotide
ggcaagtctgtccttggctaca

SEQ ID NO: 527 - DNA, 23 bp, Artificial sequence
  Single strand DNA oligonucleotide
gctagccagggatgatttgcctg

SEQ ID NO: 528 - DNA, 22 bp, Artificial sequence
  Single strand DNA oligonucleotide
gcggcaaatcatccctgctacc

SEQ ID NO: 529 - DNA, 24 bp, Artificial sequence
  Single strand DNA oligonucleotide
ggcggaatcttgatgatgctgcat

SEQ ID NO: 530 - DNA, 21 bp, Artificial sequence
  Single strand DNA oligonucleotide
tcattgagcgcagcgttgatg

SEQ ID NO: 531 - DNA, 21 bp, Artificial sequence
  Single strand DNA oligonucleotide
ggggcggactgggaacacatg

SEQ ID NO: 532 - DNA, 22 bp, Artificial sequence
  Single strand DNA oligonucleotide
gggcaacttctcctttggcaga

SEQ ID NO: 533 - DNA, 21 bp, Artificial sequence
  Single strand DNA oligonucleotide
tgccaaaggggatttgcccgg

SEQ ID NO: 534 - DNA, 24 bp, Artificial sequence
  Single strand DNA oligonucleotide
ggcagaagagagagagtacagcct

SEQ ID NO: 535 - DNA, 25 bp, Artificial sequence
  Single strand DNA oligonucleotide
tggcttagatgaccatcagcaaaca

SEQ ID NO: 536 - protein, 848 aa, Sorghum bicolor
MADFGGGDSELEEQSNEGYQEPAFEAFMCPLTKQVMHDPVTIETGQTFEREAILKWFRECRDSGRKPTCPLTQAELRSTDISPSIALRNVIDEWRARNEDKELDKAFASLSLTTTQHAQDDADTLRALLYVSQMCHRSAAKKTLVRRQGVIPTITDLLKSSSRRVRLKALEVLRLIVEDNDENKEELGKGDTIRTIIKFLSNENFQERELAVSLLYELSKLDPICERIGAIYGAILLLVGMASSKSENGVAVEKAENTLKNLDKYETNVKQMAENGRLQPLLTKLIQGTPQVQVAMAEYLGELALANDVKVVVAEQVGALLVSILKTGSLPAREATLKALREISSNESSAKILLQAGILPPLVKDLFSLGAGHLPMRLKEVSAAILANLVASGASFRSIPLDESGETLLSEEMVHSLLHLISNTGPAIECKLLNVLVGLTGSPSTVADVVSAIRSSGATISLIQFVEAAHREIRVESLKLLRNVSPYMGAELADALGLGGSTGHLGSLLGVITVTEDHRSGVTEEQAAAVALLGDLPERDWNLTRQLQELGAFRALATKLVELRRGTIRGNRHVAPFTEGAVKVLYRVTCALQLQLQEEEAAEVYVELAREVGLAPLFVELLQQQMSSGQDAVLLYSAMALENLSLQSARLTDVPEPPPPPGSLLMCGCFGGPRHRHGHGKQPQPQLPGAMGTCRVHGGFCSLRETFCLAESGCKAVERLVACLEHADDRVVEAALAALSTLVGDGVANATEGVLVVGEAEGLRPVVEVLVENRTEALQRRAVWAVERILRVEDIALEVAADQTVASALVEAYRNGDVRTRQTAERALRHLDRIPNFSSAFHQAKGRA

SEQ ID NO: 537 - protein, 739 aa, Sorghum bicolor
MAGIDLNDTVEEDEEEAEPGNPACSQQSRTSSAATPPPPPLTPLLQPRPGAAVCLELWHACAGPVAPLPRKGTVVVYLPQGHLEHLGDAAAAAAGGAPAPAALPPHVFCRVVDVTLHADASTDEVYAQLALVAENEDVARRLRGGSEDGSAGDGDDGEAVKQRFSRMPHMFCKTLTASDTSTHGGFSVPRRAAEDCFPPLDYSQQRPSQELVAKDLHGTEWRFRHIYRGQPRRHLLTTGWSAFVNKKKLVSGDAVLFLRGDDGELRLGVRRAAQLKNGSAFPALYNQCSNLGSLANVAHAVATKSVFHIYYNPRLSQSEFIIPYSKFMKSFSQQFSAGLRFKMRYESDDASERRCTGVIAGIGDADPMWRGSKWKCLMVRWDDDVDFRRPNRISPWEIELTSSVSGSHLSAPNAKRLKPCLPPDYLVPNGSGCPDFAESAQFHKVLQGQELLGYRTRDNAAVATSQPCEARNMQYIDERSCSNNVSNSIPGVPRIGVRTPLGNPRFSYHCSGFGESPRFQKVLQGQEVFQPYRGTLVDPSLRNSGFHQQDGSHVPTQANKWHPQLHGCAFRGTQAPAIPSQSSSPPSVLMFQRDNPKMSPFEFGHCHMDKNEDMRAMFGHAGGIGRTEQTMMLQAHNVSGGMGNRDVTVEKFQPTVAVGRDGSDNREVTKNSCKIFGISLTEKVPAIKEKDCGDTNYPSPFLSLKQHVPKSLGNSCATIHEQRPVVGRVIDVSTVDMMI

SEQ ID NO: 538 - protein, 702 aa, Sorghum bicolor
MAGIDLNTVEEEDEEEAEAEAPPVAARAGGGAVCLELWHACAGPVAPLPRKGSAVVYLPQGHLEHIGGDADAAGAAVPPHVLCRVVDVTLHADGATDEVYARVSLLPEDEEAERRARARVREDEDADRDGEDGAAMKPLARTPHMFCKTLTASDTSTHGGFSVPRRAAEDCFPPLDYSQQRPSQELVAKDLHGTEWKFRHIYRGQPRRHLLTTGWSAFVNKKKLVSGDAVLFLRGEDGVLRLGVRRAAQLKIVTPIPALHNQCSSQTTLGNVAQAVATRTVFHIYYNPRLSQSEFIVPYWKFTRSLNQPISVGMRCRMRYESDDASERRCTGIIIGSREAEPIWYGSKWKCLVVRWDDGIECHWPNRVSPWEIEVTGSVSGSHMCAPNSKRLKPCLPQVNPEIVLPNGSVSSDFAGSVRFHKVLQGQELLGLKTHDGTAISAFQATEASNLQYSDERSNMSNNILGIPRLGVRSPNGIPGFPYHCSGFGESQRFQKVLQGQEVFRPFRGGCLADGHIRTAGMYQPKWPAPQGCDFPQPAKPVLVLQASSPSSVLMFPQTGSKITPLEYEYSCLDKDEDGRFDRTVPTQDMGRNNQTLSLWPHLVSGEAIEECTGTENMHSSVSGAEHESNNESTVENGCKIFGISLAEKIRSCDEADSCSAKRNSGLQPSRSQILGSCWATVHEHRSVVGRVVDVSATDMMI

SEQ ID NO: 539 - protein, 470 aa, Zea mays
MAGTEVEDPPAAALEVPAKRGLLRYNSPLAQVSLLGLICFCCPGMFNALSGLGGGGQVDPTIADNANTALYACFAVFGVLGGAAHNLLGPRATLLAGALTYPLYAGSFLYYNHRPGSQVFPVTAGALLGAGAGFLWAAQGAVMTSYPPPNRRGTYISLFWCLFNLGGVLGGLLPFALNYNRGDKKGSVSDGTYIAFMAFMLVGAALTVLVLPPARIVRDDGTRATRVTFSSPATEGAEILKLFANWKMLLALPAAWASNFFYTYQFNNVNSGLFTLRTRGLNNVFYWGAQMIGSAGIGYFLDFGFASRRKRGLFGVAAVAAVGTAIWGGGLANQLSYNAVPVPDPIDFKDGHRYAGPFLLYFSYGLLDAMFQSLIYWIIGALANDSQILSRYVGFYKGVQSAGAAVAWQVDRRHTPLMSQLIVNWGLMTISYPLLALLVFLAVKDESYSVSSVEDGREKDSKLSAPTSFH

SEQ ID NO: 540 - protein, 584 aa, Zea mays
MAISSALPCSSLLMAAAQLKLLASVVVQVQGITRHYDFNVTMANVTRLCATKSIVTVNGQFPGPKIVAREGDRLIIRVTNQAQHNISLHWHGIRQLRTGWADGPAYITQCPIQTGQSYVYNYTVAGQRGTLWWHAHISWLRATVYGPLVVLPRPGVPYPFPAPYKEVPVIFGEWWLADTEVVVEQALQLGAGPNVSDAHTINGLPGPLYNCSAKDTYKLKVKPGKTYMLRLINAALNDELFFSVANHSLTVVEVDAVYVKPFTVDTLPIAPGQTTNVLLAAKPFYPGANYYMSAKPYSTARPATFDNTTVAGILEYEYPDAPSSSAASFDKALPLHRPTLPQLNDTSFVGNFTAKLRSLATPQYPAAVPRTVDRAFFFTVGLGTHPCPGNATCLGPTNTTQFAAAVNNVSFVLPTRALLHSHFAGLSSGVYSSDFPVAPLTPFNYTGTPPNNTNVASGTKLMVVPYGANVELVLQGTSILGVESHPLHLHGFNFFVVGQGYGNYDPVNDPPKFNLVDPVERNTVGVPAGGWVAIRFLADNPGVWFMHCHLEVHTTWGLRMAWLVLDGSLPHQKLLPPPSDLPKC

SEQ ID NO: 541 - protein, 587 aa, Zea mays
MAISSALPCSSLLMAAAQLMLLASVVVQVQGITRHYDFNVTMANVTRLCASKSIITVNGQFPGPKIVAREGDRLVIRVTNHAQHNISLHWHGIRQLRTGWADGPAYITQCPIQTGQSYVYNYTVVGQRGTLWWHAHISWLRATVYGPLVILPKLGVPYPFPAPYKEVPVIFGEWWLADTEVVIKQALQLGAGPNVSDAHTINGLPGPLYNCSAKDTYKLKVKPGKTYMLRLINAALNDELFFSVANHSLTVVEVDAVYVKPFTVDTLLIAPGQTTNVLLAAKPSYPGANYYMSAAPYSTARPATFDNTTVAGILEYELYPDAPRPSASAGSFNEALPLYRPTLPQLNDTSFVGNFTAKLRSLATPRYPAAVPRTVDRRFFFAVGLGTHPCPANATCQGPTNTTQFAASVNNVSFVLPTKALLHSHFTGLSSGVYSPDFPVAPLAPFNYTGTPPNNTNVASGTKLMVVPYGANVELVMQGTSILGVESHPLHLHGFNFFVVGQGYGNYDPVNDPSKFNLVDPVERNTVGVPAGGWVAIRFLADNPGVWFMHCHLEAHTTWGLRMAWLVLDGSLPHQKLLPPPSDLPKC

SEQ ID NO: 542 - protein, 87 aa, Zea mays
MATAFVPSVSAMATAAAAPTSVAPSPAPKANNSRKAAVPGMTGYELLKRVKESAALSDILVVIMSSENVPNRITRCLEELDPRLAVI

SEQ ID NO: 543 - protein, 383 aa, Zea mays
MATGGGGGSDDFHGLTFGQKIYFEQDAGAAGGSATGGRKGKGAAASASAAQPPRCRVDGCGVDLSAVKQYYCRHKVCYMHSKEPRVFVAGIEQRFCQQCSRFHQLPEFDQGKRSCRRRLIGHNERRRKPPPGPLTSRYGPLAASLVQEPGRFRSFLLDFSYPRVPSSVRDDAWQWQGMQHGGDRMLLGTASAIQWHGNQEPHPPHRSAAAGYGNHAYNNCHGGGGLVAAAAGASMLSSAFEPPPGGGGCVAGATAADSSCALSLLSTQPWDTPTQSGSSHHNRSPAMSAAAGAFEVAPSSVVASSYTASSSWSGSRDPADGARKNAQRHDDGLHLVHPPGPVHHGHFSGELELALQGSGPPHVDHGGGTCFSHSDTNAMNWSL

SEQ ID NO: 544 - protein, 378 aa, Zea mays
MATGGGSSRSDDVRGLKFGKKIYFEQDGGSGSGAGAVGGRKGKGVATGGARPASAASAAQPPRCQVDGCGVDLSAVKQYYCRHKVCNMHSKEPRVFVAGIEQRFCQQCSRFHQLHEFDQGKRSCRRRLIGHNERRRKPPPGPLTSRYGRLAASLQEPGRFRSFLLDFSYPRVPSSVRDAWPGIQHGGDRMLGTVQWHGHQEPPHPHRSAAAGYGNHAAYNCHGGLVAGGAPMLSSAAFELPPGGCVAGVAADSSCALSLLSTQPWDTTSHDHRSPAMPAAGAFDGTPVAPSVMASSYAASSAWTGSRDPAADGARNAQRLDDALHLVHPGSAAVHFSGELELALQGSGGPPHLPRVDHGGSGGGTFNHSTTSAMNWSL

SEQ ID NO: 545 - protein, 489 aa, Zea mays
MATQAAFLAGFSQLAAQPGRDRAVAVAVAPAPGPARVAVAAVGSAKLGVKAGTSRTAAVARLGVRCRASLIEPDGGRLVDLVAPEEGGRRAALRREAAELPHRLRLGRVDKEWVHVLSEGWASPLQGFMREHEFLQALHFNAIRGQDGRMVNMSVPIVLSVGDAQRRAIQADGATRVALVDERDRPIAVLSDIEIYKHNKEERVARTWGTTAPGLPYVEEAITNAGDWLVGGDLEVIEPIKYNDGLDQYRLSPAQLREEFARRNADAVFAFQLRNPVHNGHALLMTDTRKRLLEMGYKNPVLLLHPLGGFTKADDVPLSWRMKQHEKVLEEGVLNPESTVVAIFPSPMHYAGPTEVQWHAKARINAGANFYIVGRDPAGMSHPTEKRDLYDADHGKKVLSMAPGLERLNILPFKVAAYDTKQKKMDFFDPSRKDDFLFISGTKMRTLAKNRESPPDGFMCPGGWKVLVEYYDSLVPSEGSSKLREPVAA

SEQ ID NO: 546 - protein, 489 aa, Zea mays; identical to SEQ ID NO: 545

SEQ ID NO: 547 - protein, 720 aa, Sorghum bicolor
MATSALDSLPAPLRSLRLKTKQQELLLRVSALALIYVLAFAVRLFSVLRYESMIHEFDPYFNYRTTLFLTENGFSEFWNWFDSESWYPLGRVVGGTLFPGLMVTAALLHRLLRALSLAVHIREVCVLTAPFFAANTTLVAYAFGREIWDSGAGLVAAALIAIVPGYISRSVAGSYDNEGVAIFALLLTFYLFVRAVNTGSLAWALASAFGYFYMVSAWGGYVFIINLIPLYVLVLLVTGRYSQRLYVAYNCMYVLGMLLAMQIRFVGFQHVQSGEHMAAMGVFFLLQVFFFLDWVKYLLNDARLFKSFLRTTLTCVITVGTLALGIGTASGYISPWTGRFYSLLDPTYAKDHIPIIASVSEHQPTAWSSFMFDFHILLFLFPAGLYFCFKRLSDATIFIVMYGLTSMYFAGVMVRLILVAAPAVCLISAIAASATIKNLTTLIRAKSRSPQTTSGKTTGSKAAAKGAVDQSLPFQHNAAIALLLGAFYLLSRYAIHCTWVTSEAYSSPSIVLAARGHNGGRVIFDDYREAYYWLRQNTPPDAKIMSWWDYGYQITAMGNRTVIVDNNTWNNTHIATVGRAMSSYEDEAYEIMQSLDVNYVLVVFGGVTGYSSDDINKFLWMVRIGGGVFPVIKEPDYLVNGEYRIDKGAAPKMLNCLMYKLCYYRFGELTTEYGKPPGYDRVRGVEIGNKDIKLEYLEEAFTTSNWIVRIYKVKPPKNRS

SEQ ID NO: 548 - protein, 579 aa, Sorghum bicolor
MATSYLLPCYVLITVLVLFFSVDVTEGAIREYQFDVQMTNVTRLCSSKSIVTVNGQFPGPPVFAREGDFVVIRVVNHVPYNMSIHWHGVRQLRSGWADGPAYITQCPIQSGQSYVYKFTITGQRGTLWWHAHISWLRATVYGAIVILPKPGVPYPFPAPYKEVPVIFGEWWTADTEAVISQALQTGGGPNVSDAFTINGLPGPLYNCSAKDTFKLKVKPGKTYMLRIINAALNDELFFSIAGHPLTVVDVDAVYIKPITVDTILITPGQTTNVLLTTKPSYPGATYYMLAAPYSTARPGTFDNTTVAGILEYEDPTSPPPHAAFNKNLPALKPTLPQINDTSFVANYTAKLRSLATAEYPAAVPQEVDRRFFFTVGLGTHPCAVNGTCQGPTNSSRFAASVNNVSFVLPTTALLQSHFAGKSKGVYSSNFPAAPLVPFNYTGTPPNNTNVANGTKLVVLPYGASVELVLQGTSILGAESHPLHLHGFNFFVVGQGFGNFDPAKDPAKYNLVDPVERNTVGVPAAGWVAIRFRADNPGVWFMHCHLEVHVSWGLKMAWLVLDGDRPNEKLLPPPSDLPRC

SEQ ID NO: 549 - protein, 220 aa, Zea mays
MCARSIALASLGLRVPASGSSPSSSAPIHAASPSLSSPSRDPRREASMWPRVLPLLLPRGAQPCRASLPWLFHSPALPHRRSPISMVARPPVLWPCRASWSSPRPAKLPCARPATPLSLAARVPLLAKAPARSLRSCFRGGRSSSSGARAPSPWCSASSPMARRAPLLSPPARAPYGVHLPGKSSLFPLPWRVSSSTSGRRLRARPQTVVRPILSPSRGS

SEQ ID NO: 550 - protein, 155 aa, Zea mays
MCPARPWRQPQLGAPSASPGLRLLLAPAWSSLDLQLRRPAELPGCRALLSFAAHRCSSSRRPCFSLSSSTPAMARVSAPSPTACPSSSSRPRPRRGPSSPALLPAQLSSARPISLRSAPSSVFLGRARSGRGHRRAQGPARRMSTHHAWSNGGNL

SEQ ID NO: 551 - protein, 247 aa, Zea mays
MDVFTKQLLPMPHQRDPNYPSSSTSSSSSSSSSTPPSRPHHRAQPQPHNLPQSPRPVPRTIDTTPFPTTFVQADTTSFKQVVQMLTGAEQPANNDATTAGAAAAAAANGGGAGAQAASGGPCCRPKKPSFKLYERRSSLKNLKMIAPLAMGSPPSPSPRRAAPEILSPSVLDFPSLTLSPVTPLAGDPFNRSPASASSSEEAERAAIAERGFFLHPSPRGAEPPRLLPLFPVVSPRMAGAAAAPSSE

SEQ ID NO: 552 - protein, 325 aa, Zea mays
MDWAAASGSPSWGAAATDPGPTMLSFAGPSSSAADAEVRLQDFAAGLAQSSRPTGAAPGAGRRSRAAVGGAGAEACSVDGCRSDLSRCREYHRRHKVCEAHSKAPVVVVGGQERRFCQQCSRFHMLSEFDEEKRSCRKRLDGHNRRRRKPQHDLTNLGGFFPYHQVNQFEFYPQTIPTVGQNSDAVHLVGRQQPFSISFSRTPDEFPFPQGGGSSVLHHLHAARPGHHAEGSSHTGSSTRDNALSGTLGPECALSLLSSSLRRPSTAGVPAVGQPQVTASSTTAVSQAATAAVATAAFAASAGHHVFVPDAMFEDPSQALPFSWQ

SEQ ID NO: 553 - protein, 432 aa, Zea mays subsp. mays
MDWDLKAAGAWDLAELEQDHAAAAPSSGGHAANAAAAGTGTESRPPAPGAAGAPAECSVDLKLGGMGECEPGAARREREAAAGAAKRPRPAGPGGQQQQQCPSCAVDGCRADLGKCRDYHRRHKVCEAHSKTPVVVVAGREMRFCQQCSRFHLLAEFDADKRSCRKRLDGHNRRRRKPQPDTMASASFIASQQGTRFSPFAHPRLEASWPPGVMKNEESPYHITHQIPLGSSSSGNRQQHFVALGAATPAYAKEGRRFPFLQEGEISFATGVVLEPPASAPACQPLLRTGAPSESSGAGGSKMFSDQGLARVLDSDCALSLLSAPANSSGIDVSRMVRPTEHVPMAQQPVVPGLQFGSASWFPRPQASTGGSFVPSCPAAVEGEQQLNAVLGPNDSEVSMNYGGMFHVGGGSGGGEGSSDGGTSSSMPFSWQ

SEQ ID NO: 554 - protein, 546 aa, Zea mays
MFATFLLLLWSHAPAPALSLPPRPPVRCSDGGTTGCVLSNAYGAWSSDRADCPVSSVAYPASEQEVVAAVARASASGARVKVVSGFAHTIPKLACPGGGNGTTTTLLISLTAAPYWEGVSVAGLVSTGSHGSSWWGRGGAVHDHVVGLRLVVTAGEADGWARVLTLRRGDELFPAALVSLGLLGVVSKITLSLEPRFKRSITFDYRNDSTFQDDFAAHAASHEFADITWYPSQHTAVYRIDDRAPANAPGDGVNDFIGFQATPIAVTAGLRVVETSLERSKNMKGKCAMAAAEGVAKRLVGNGLKNNGLLFTGYPVVGYQGKMQTSGSCARSSAADLLSACGWDPRFHGLFFYESTAIFSPARFRDFILDVKRLRDLAGSDSLCGVDVYNGLLVRFVKASAAHLGQPEDSVVVDFNYYRASDSAAPRLSQDVWEEVEQLAFVKHGARPHWAKNRLVAFAGVRGKYPRWGQFAAAKRQLDPRGLFDSPWSDEVVGGVELAKGDGCALDGRCVCSEDRHCSPEQGYYCRPGLVFTDARVCRYSGSQNQ

SEQ ID NO: 555 - protein, 680 aa, Zea mays
MGIDLNAVGEDDPAGAVCAELWHACAGAGVALPRRGSAVVYLPQAHLAAGGCDGGGVSAPAPPRVPPHVVCRVVDVELRADAATDEVYARLALVAMDTMFGRNINDGETEEKNGEEEDGDGEKKHASHMFCKTLTASDTSTHGGFSVPRRAAEDCFPPLDYEQLRPSQELIAKDLHGMKWRFRHIYRGQPRRHLLTTGWSSFINKKKLVSGDAVLFLRGNDGELRLGVRRAVQLKNEALLEAVNCTDSKLLMLSAVANSLDNRSIFHICFNPRVGASEFIVPYCKFLKSLNYHFSVGTRFKVGCENEDANERSFGLIIGISEVDPIHWPGSKWKSLLIKWDGATKYSHQNRVSPWDIEGVGSSVSVTHRLSSSVSKRTKLCFPPSDLDTPILDGNGRPDSVETERFHRVLQGQELVHSSIHGTACSHSSDSPRCQGSYGRRFSADAWNCKMNDVMSGPRHLNATGFAYQPLGFSESVKFSEVLQGQEMSQAVPSFMRSAFNSGTQNGRVRPFDYVQRSDATQGYALQQFNLPATEVHSPSSVLMFNQTMVPHAELDGATNREEVHGSRYLSSNAIGREAEPWPSMQQQRASVNGSEPLDTTEASAPARNAESGSVGRGAGRSNCKLFGFSLTEKILGTDGGGVKEGNYEVDRQTPRVLDLFGHGSTPGALHALCAAPLGI

SEQ ID NO: 556 - protein, 680 aa, Zea mays
MGIDLNAVGEDDPAGAVCPELWHACAGAGVALPRRGSAVVYLPQAHLAAGGCDGGGGLAPAPPRVPPHVVCRVVDVELRADAATDEVYARLALVAMDTMFGRNINDGETEEKNGEEEDGDGEKKHASHMFCKTLTASDTSTHGGFSVPRRAAEDCFPPLDYEQLRPSQELIAKDLHGMKWRFRHIYRGQPRRHLLTTGWSSFINKKKLVSGDAVLFLRGNDGELRLGVRRAVQLKNEALLEAVNCTDSKLLMLSAVANSLDNRSIFHICFNPRVGASEFIVPYCKFLKSLNYHFSVGTRFKVGCENEDANERSFGLIIGISEVDPIHWPGSKWKSLLIKWDGATKYSHQNRVSPWDIEGVGSSVSVTHRLSSSVSKRTKLCFPPSDLDTPILDGNGRPDSVETERFHRVLQGQELVHSSIHGTACSHSSDSPRCQGSYGRRFSADAWNCKMNDVMSGPRHLNATGFAYQPLGFSESVKFSEVLQGQEMSQAVPSFMRSAFNSGTQNGRVRPFDYVQRSDATQGYALQQFNLPATEVHSPSSVLMFNQTMVPHAELDGATNREEVHGSRYLSSNAIGREAEPWPSMQQQRASVNGSEPLDTTEASAPARNAESGSVGRGAGRSNCKLFGFSLTEKILGTDGGGVKEGNYEVDRQTPRVLDLFGHGSTPGALHALCAAPLGI

SEQ ID NO: 557 - protein, 240 aa, Oryza sativa Japonica Group
MGRGKIVIRRIDNSTSRQVTFSKRRNGIFKKAKELAILCDAEVGLMIFSSTGRLYEYSSTSMKSVIDRYGKSKDEQQAVANPNSELKFWQREAASLRQQLHNLQENHRQLMGEDLSGLNVKELQSLENQLEISLRSVRTKKDHVLIDEIHELNRKGSLVHQENMELYKKISLIRQENAELYKKIYETEGPSEVNRDSPTPYNFAVIEKTNVPVQLGLSTLPQHSDAEQSTAPKLGLQLNP

SEQ ID NO: 558 - protein, 240 aa, Zea mays
MGRGKIVIRRIDNSTSRQVTFSKRRNGIFKKAKELAILCDAEVGLVIFSSTGRLYEYSSTSMKSVIDRYGKAKEEQQDVANPNSELKFWQREAASLRQQLHNLQENYRQLTGDDLSGLNVKELQSLENQLETSLRGVRAKKDHLLIDEIHDLNRKASLFHQENTDLYNKINLIRQENDELHKKIYETEGPSGVNRESPTPFNFAVVETRDVPVQLELSTLPQQNNIEPSTAPKLGLQLIP

SEQ ID NO: 559 - protein, 440 aa, Sorghum bicolor
MGSFGMNWNQKNSMVWDWEHLVPSVSNAVTRHGSANSSGGTLTSSSELGHGSSKSSISASIDSPSGVGNSLEFNFAAVQRHVKNTGTNGRVDDSGNSPSSMIAFSQGEPLISLKLGKRAYFENVCGGQEAKVSAPSDVTSAVTVVKKTKVSQQNAKNWYCQVEGCKVDLSSAKDYNRKHKVCVAHSKAPKVVVAGLERRFCQQCSRFHGLAEFDQNKRSCRRRLTHHNARRRKPQADAISFNSSRLSSMFYDTSHRTNLFFSQPLYGQVRSNAVSPWDNSGGFKFMETKHLSVQPTKTVGLDELHFSTPQISTSVVAHTGHHHNFDRFMPFKGTNTKVLNQVSGVEASATASNSNNGAPEPGRALSLLSDGSWGSNSAVIQQPPSHADAGALPPLATVAVSNTAARHPLDPSLGRFWQDDHPPLDGPAPQIQELAHLRTW

SEQ ID NO: 560 - protein, 495 aa, Zea mays
MGTAAVVEDTIRVVLTCLPDPPFRTTGSSRPYQSPSGGGGGGDRISRLSDAVLSNIVARLPAKDAARTTALSRRWRRVWASTPLVLDDSDLLVFHDDGGCSTPNWLAVTDTVSHVLSSHRGPIRFVRLTCCYMALASHNGALQYWLRVLAAGGVEDLVLVNRPLPTSVGLPIDVLHLASLRTLYLGFWCFPDTATLPRGRATVFPCLQEIGLCATVIHARDIDHLLACSPVLEKFASITSIYFTDPVRIRSCSLRCLVFWESLANELDLVVAPRLQRLILWQSRQWMIGSVHFRSRIRIGSATELKVLGYLEPSIHQLEIGGTIIDSGTKMTPSNMVPSVKILALKMQFRIRKEVKMLPTFLRCFPNVETLHVLSHETDEQNGKFNLKFWEEVGSISCLETRITKVVFDRFRGERCELAFLKFVLERAESLLKLVVVLANGDQASVDEMLAKLKSLTTVKRASDFPTLLAVAREGDSAWYFERASDLSVTDPFDL

SEQ ID NO: 561 - protein, 616 aa, Sorghum bicolor
MGTTARREPLKQRVNRCLLKLSDRDTEAMAAAELEAIARALEPDELPAFVSAVSDARPTDKTPLRRHALRALALVAASHPRDAVAPLVPRILAAALRRVRDQDSSVRAALVDTARAAAAASASASAALRPLTDALLHEQDQCAQLAAALATAAAVEASAVTADLASYLHKLQPRLLKLLRSNAFKAKPALITLIGASAAMAGDAEVTASIPCLRDAIASDDWAARKAAAEALAALALEHTDLLTTYKSSCVTFFEARRFDKVKIVRESMNRMIEAWKEIPGAEEDECSSAPPPASQSQRRSSLTGSASDGRYPAASLGSNSVPSSTRRSRLPVSRSSPPDVSPSVTKTNSPSSIRNKKLSPPSYRKVRQANNCDYKVEIAVAPDATPIKVVTEEKLLKGGNVRDRLEARRTLFQGSEDRSAKLAGHKAGSRVVPYEGGGNLEEISEVEGGSERYTVHKDESLSEIRTQLLQIENQQSSLLDLLQKFMGKSENGMNSLETRVHGLEMALDEISRDLAFSSGRMSNREPDVKTCCILSPKFWRRHNGGRSSSRFSASDPANSSDESRTSYKWERQKFGLQGGFVTNPLAEPNISSVGKTMVTQEGRKKDTTLQKSRMG

SEQ ID NO: 562 - protein, 253 aa, Zea mays
MHMPIRCFPNLLFFFWSEPGRFRSFLLDFSYPRVPSSVRDDAWQWQGMQHGGDRMLLGTASAIQWHGNQEPHPPHRSAAAGYGNHAYNNCHGGGGLVAAAAGASMLSSAFEPPPGGGGCVAGATAADSSCALSLLSTQPWDTPTQSGSSHHNRSPAMSAAAGAFEVAPSSVVASSYTASSSWSGSRDPADGARKNAQRHDDGLHLVHPPGPVHHGHFSGELELALQGSGPPHVDHGGGTCFSHSDTNAMNWSL

SEQ ID NO: 563 - protein, 718 aa, Zea mays
MKSLAKQETQPKSRLIVRLGVFLASHHILFSVICCYAGIIALLLLPSLAKNTYLSENALIPGSANPLFSTEDAIEANRFMKAIEAVARDSSSVIGMANFIAQQIEDLGAEVCYQKFLPHGKNFHPLKFFTSMTNDIAIQPNGTATNFGINTIGILRAPRGDGKEAIVLVTPYNSQRVQSNELLSLALGFSVFSLLSRAAWLSKDVVWLSADSQFGEYAAVSAWLNQYHNPVFLSHSVVSHTKMYGANNIYDGNSEKTEATAFKRAGTMAAALIFKVGETRRYSDRDSVTIYAEASNGQMPNLDLLNVVHYLAVHRQGFRVNIAAFSSLLSSAWLRVIAEILHTIGSVLRKINPDWKLDIAVPDYVEGTANLANSMYNQALGVPTGSHGAFRDYQVDAVSLEFSPTFHVKNENAKSLFLLKGGRLIEGVARSVNNLLEKFHQSFFLYFLTGPSKFISVGVYMIPFALLLAPLPIVAAALADGSRSMEKTADKLIGDGKTDGIADISQNKGGSWKWLRAAKVLLVVQLWAVLVSLLPYYITQIPDATPTQSTLIWVVLSIVVLISLSVLFGSPYSTGVEWKLLKATMITSISIGLGLMSIINFATAQLGALIVIPMCLFSRPLKASGMNFLPRAVLLASNVAFAVLGFPPVALLIMKGVSKGSRSWTIDVGDFWVWMEFLWERSSATYLYLFLVHLPCWLLCVLVFLHPCHQSEYKLKQE

SEQ ID NO: 564 - protein, 491 aa, Sorghum bicolor
MKTRSSARGEPRRLGNAALLALMLCSVVALSLIRGRFAPIGSTAGDAIKSEDDAAAAAVAVSKAAAVNVDTGDGADEAAAEAAAEEKDKEEVQPKPAADGSRGGAAKPVCYETSRRSDTCEAAGDVRVLGSSQTVYVDSLDREWKTKPYCRKHDNFALAHVKEWSLKPLPSGAAPQCTVNSSATAFVLSTGGFTGNPFHDYTDVLIPAFITAHPLRGEVQFLVSSYKSWWMNRYIQIFQQMSRHEVVDIDADDEVRCYRNVVVGPTFHRELGVDASKSPSPGYSTADFRKMLRDAFGLERATATPSGDRWDIRRRPRLLIISRRPSRGRAFMNERAMADMAASLGFDVRIGEPDSSTDTSKFARLVNSADVMVGVHGAGLTNMVFLPAGAVVVQVVPYGRLEWLARNTFAEPSAGMEVHYLEYVVQLDETTLSEQYPSDHPVLRDPMAIHKQGWNALKTTYLDKQNVRPHLGRLKNTFLQALKMLPHGRDD

SEQ ID NO: 565 - protein, 327 aa, Zea mays
MPRPPTMVIQDDYIDMDLTPAATPEPSPASPRFEFQSAGAGAAGDRHREAAFASPADELFYKGNLLPLHLPPRLQLVQRLLQDQEQPPPLRGAKRDAESDATAAAAAERGDADAAAAASKVCAAKKPSWAKKLKVVKRWASKEYIRSLFLARPPLPSDIVAAAGGASASGHGIGSVSARGSVLEQEEVCQCQHRKSFSGIIRRVRLVATKAPGTSPLCSSSSSSSSSSTPSCRNANGFFFRTPASAAGATPALKRSSSAGSSEEGAIQGAIAHCKRSQLLQPGMVASAAARRSVSDVMFYSVTNTPRASSVTAGEVAQERRQEMCRG

SEQ ID NO: 566 - protein, 284 aa, Zea mays
MRCKKHPYQVGGGGVCATCLRDRLIALEAAQNGDASSSPPPPAAAPAFPRSVSPYVSRRKSDTSGGGGALRHHPSLLFFRTPQVGPAYGGGALEEGDIGYEYKRRRAGKFSVLATLFGHHHGHRSEETHQEGATERKKHSWFAAIMPRRRKKQAAPASITSPRSAPPRRSCRVVSNRGLSPERDSHGSGDESSSPAADPPWRPSPSPMRRTRCRRRQTNSMPSGFAVCLSPLVRPSPGRRRHVQPPDPGSFSSEFRPSPLHSLSSAASVTRCRSRKLADVGRFR

SEQ ID NO: 567 - protein, 199 aa, Zea mays
MSLLGSLPSAMATSTTFSCRCFSSGARPCVGHAPGCRVPASCALAPNPTRPPCSDRVLGSSSALSCAGVLYSIFFPSAPWYSLAAARALPCLLVVDAGRCPCRAPFSSPASRALRGRRSQPSTHRAPCRCAPSRLHSDRALAAGARRPRLSCTLLRSSRSPLSSPCVRSHVPLLAVLAVYVIAGLVSPTIVMLLFPAAP

SEQ ID NO: 568 - protein, 267 aa, Zea mays
MSSGSFMTSQQGTRFSSFPVPRPEPSWPGVIKSEDSGSYYAHQRHPVLSSRPHFAGGGSTPPAYSSKEGRRFPFLQDGCDQQQVGGFSAGAGAQQLEVSSTSTVCQPLLKAAAAAAPPPPPESSSSNKMFSDGLAPAVLDSDCALSLLSSPANSSSVDVGRMVVHQPAEHIPMAQPLVPGGLQQQQQHHPFGGSPAWFACSQAGSSAVSAGGFACPPGVESEQLNTVLVPSSDGGGHDMNMNYHGIFHVGGDGSSDGTSPSLPFSWQ

SEQ ID NO: 569 - protein, 169 aa, Zea mays
MTAAARTTRSRLPWAEDIDADVAPLICEEATATGSSSSAGSEQVAGWPAPASSAAMSAWMTAVAASRYRVGFRFSSHVRPMRWQSSRCSCFAFADDVALLLPPSCSPGNPVQGVSKQINSDGNFLHRERTEIPAEVKDTRLRERTGPPAMAMAVLVPSLSEQLAHAESA

SEQ ID NO: 570 - protein, 491 aa, Zea mays
MTLVRMPCRLCCFLLVVAASAVSGRGRVVTTLPGYEGRLPFHLETGYVEVDEDAGAELFYYFVRAESGADDSDTPFVLRIPGGQRCSAFSGLAYEIGPIMFVVEPYNGSLPRLRYNPNSWTKVAHILFVDSPVGAGFSFSRDAKGYNAGAVSTTLHLAKFLNKWFNDHPEYHANPFYIDGESYAGKIVPFLAQMISEGIGAGMKSAPRLKGYLVGNPSTEERIDVSARVPCAHGFGIISHQLYEMILGHCHGEDYSNPAKELCGQALKTFNDLTSEVAQGHVLQEKCVAASSSPVLNANSRVAGGSSSWASDGRKILREEEMVGRRGVLGKLFHPPALPPFSCRVYRYYLSYFWANDRRTRDALGIKEGTVDEWVRCHNDDQELPYESELKSVVKYHRNLTSRGYRAMVYSGDHDLLVPHLGTQAWVRSLNFPVVDDWRAWHLGGQSAGFTITYSNNMTFATIKGAGHTAPEYEPERCFAMFSRWILNRPL

SEQ ID NO: 571 - protein, 492 aa, Zea mays
MTLVRMPCRLCCFLLVVAASAVSGRGRVVTTLPGYEGRLPFHLETGYVEVDEDAGAELFYYFVRAESGADDSDTPFVLRIPGGQRCSAFSGLAYEIGPIMFVVEPYNGSLPRLRYNPNSWTKVAHILFVDSPVGAGFSFSRDAKGYNAGAVSTTMHLAKFLTKWFNDHPEYHANPFYIDGESYAGKIVPFLAQMISEGIEAGMKSAPRLKGYLVGNPSTEERIDVSARVPCAHGFGIISHQLYEMILGHCHGEDYSNPAKELCGQALKTFNNLTSEVAQGHVLQEKCVAASSSPVPNANSRVAGGSSSWASDGRKILREEEMVGRRGVVLGKLFHPPALPPFSCRVYRYYLSYFWANDRRTRDALGIKEGTVDEWVRCHNDDQELPYESELKSVVKYHRNLTSRGYRALVYSGDHDLLVPHLGTQAWVRSLNFPVVDDWRAWHLGGQSAGFTTTYSNNMTFATIKGAGHTAPEYEPERCFAMFSRWILNRPL

SEQ ID NO: 572 - protein, 516 aa, Zea mays
MTSIVWSVYTLSRSWPAVSINARCMHGVCRHGIRQIRTGWADGPEFVTQCPIRPGGSYKYRFTIQGQEGTLWWHAHSSWLRATVYGALIIRPRENKTYPFAKPSREVPVILGEWWDANPIDVIREAQRTGGGPNVSDAFTINGQPGDLYKCSNKETTAIPVKAGETALLRFINAALNHELFVTIAQHKMTVVATDASYTKPFTTSVLMLAPGQTTDVLVTMDQPPTRYYVAARAYVSGQNVAFDNTTTTAVLEYDCGCASDFGPKIQPAFPAALPAFNDTSAATAFAAGIRSPDRVKVHENVDEYLFFTVGLGLFNCKPGQLCAGPNNNTRFAASMNNVSFVFPQTDSLLHAHYYKIPGVFTTDFPAYPPVQFDYTGQNVSQALWQPVPATKLYPLRFGSVVQLVLQDTSIVTPENHPIHIHGYDFFILAEGFGNFDPKKDVEKFNYVDPPQRNTVAVPVNGWAVIQFVADNPGVWLMHCHLDVHITWGLAMAFLVEDGYGELQSLEPPPVDLPMC

SEQ ID NO: 573 - protein, 506 aa, Sorghum bicolor
MVASAKGRLVSVLAVAAALAAVLLYRAPFSKSLGGEGCSLLPHDHFWVASDRVVTLGRVGPAAVEVKGGLINAIAVGDYRSFVLRRPLLDYGDAVIMPGLIDVHAHLDEPGRAEWEGFSTGTRAAAAGGITTLVDMPLNSFPSTVSEETLKLKLEAAQDKLYVDVGFWGGLVPENAFNPSALEGLLNAGVLGLKSFMCPSGINDFPMTNSTHIEEGLVTLAKYKRPLLIHAERIPEAEDDDMREDELDPRSYMTYLKSRPPSWEESAIRDLHRAMKDTESGGRSEGAHIHIVHLSDAKTSLELMKDAKRSGASLSIETCPHYLAFSSEEVPDGDTRFKCSPPIRDDTNRENLWKALLDGHIDMLSSDHSPSTPDLKLMEEGNFLRAWGGISSLQFVLPVTWSYGRKYGITLNQLSSWWSENPAKLAGQKNKGAILPGYHADIVVWKPETEFQLDDSHVIYHKHQNISAYLGKQLSGKVLSTFVRGNLVFAEDKHANVACGVPILAK

SEQ ID NO: 574 - protein, 368 aa, Sorghum bicolor
MVMGASGSKLEKALGDQFPEGERYFGLENFGNTCYCNSVLQALYFCIPFREQLLEYYANNKTPGDAEENLLTCLADLFMQISQAKKKTGVIAPKRFVQRVKKQNELFRSYMHQDAHEFLNFLLNELVDILEKESSAAKDSPQLSSPEKAPNGPVQPLANGVKKEPPVTLVHKNFQGILTNETRCLRCETVTARDETFLDLSVDIEQNSSITSCLKNFCSTETLNAEDKFFCDKCCSLQEAQKRMKIKKAPHILVIHLKRFKYIEQLGRYKKLSYRVVFPMELKLSNTSDDVDTEYSLFAVVVHVGSGPNHGHYVSLVKSHNHWLFFDDENVEMVEEQTLQTFFGSSHEYSGNTDHGYILFYEGLGGKS

SEQ ID NO: 575 - protein, 329 aa, Zea mays
PSTAPAPARCQVDGCNVDLTDVKPAYYCRHKVCKMHSKEPRVLVNGLEQRFCQQCSRFHQLPEFDQLKKSCRKRLAGHNERRRRPPPGPLASRYGRHAASLGEPGRLRSFMLDFSYPRVSSAMRGGFPAVRPGGERVPGGIQWQAGLDPRHHQGAVAGYGAHYGSEGGSSSSARPPVFPGPELPPGGCLAGVPADSSCALSLLSTQPWDAAHSHSHSHAAPTAGFDGGSPVAPSLMAASSYIAPSPWTETDSWGHEGGRSVPQLPPDDVPLGEVHSGSSSHHGQFSGELELALQGNRPAPGSAAPPAPRNNQGSAGTFDQAGNTMDWSL

SEQ ID NO: 576 - DNA, 2718 bp, Sorghum bicolor
atggcggatttcggtggcggcgacagcgagctggaggagcaatccaatgaggggtaccaggagccggcgttcgaggccttcatgtgccctctcaccaagcaggtgatgcacgaccccgtgacgatcgagaccgggcagaccttcgagcgggaggccatcctcaagtggttcagggagtgcagggacagcgggaggaagccgacgtgcccgctcacgcaggcggagctgcgcagcaccgacatcagccccagcatcgccctgcgcaacgtcatcgacgagtggagggcaaggaacgaggacaaggagctggacaaggccttcgcctccctcagtctcaccaccacacagcatgctcaagacgacgccgacaccctgcgcgcactcctctacgtctcccaaatgtgccacaggagcgccgccaagaagaccctcgtgcgcaggcaaggcgtcatacccaccatcactgacctgctcaagagcagcagcagaagggttcgcctcaaggccctcgaagtccttcgtctcatcgtcgaggacaacgacgaaaataaggaagagctggggaaaggtgacaccatacgcaccatcatcaagttcctgtccaatgagaatttccaagagagggagcttgcagtttcgctattgtacgagctctcaaagctcgatcctatatgcgaaaggatcggcgcaatctacggggccatactcctactggttgggatggcaagcagcaaatcagagaatggtgtggctgtggagaaagccgagaacacgctcaagaatctggacaagtacgaaacaaacgtcaagcaaatggctgagaacggcaggcttcagcctctgcttacaaaacttattcaaggcacacctcaagttcaggtcgccatggctgaatacctcggcgagcttgcgttggcgaacgacgtgaaggtggtggtggcagagcaggtcggggctctgctcgtgagcatcttgaagacgggcagccttccggcaagagaggccacgctcaaagccctgagggagatatcgtcaaacgagtccagcgccaagatcctgctccaggcgggcatcctgccgccgctggtgaaggacctcttctccttgggcgccggccacctgccgatgaggctcaaggaggtgtcggccgcgatcctggccaacctggtggcgtcgggcgccagcttccggtccatcccgctggacgagagcggggagacgctgctgtcggaggagatggtgcacagcctgctgcacctcatcagcaacaccgggccggccatcgagtgcaagctcctcaacgtcctcgtggggctcaccggctccccgtccacggtggccgacgtggtctccgccatccgcagctccggggccaccatcagcctgatccagttcgtggaggccgcgcaccgggagatccgcgtggagtccctcaagctgctgcgcaacgtgtcgccgtacatgggcgcggagctagcggacgccctcggcctcggaggcagcaccggccacctgggcagcctgctgggggtgatcaccgtcaccgaagaccaccggagcggcgtgacggaggagcaggcggcggccgtggctctgctgggcgacctccccgagagggactggaacctgacgcggcagctgcaggagctgggcgcgttccgggcgctggcgacgaagctggtggagctccggcggggcacgatccgcggcaaccggcacgtggcgcccttcacggagggggcggtgaaggtgctgtacagggtgacgtgcgcgctgcagctgcagctgcaggaagaggaggcggcggaggtgtacgtggagctggcgcgggaggtgggcctggcgccgctcttcgtggagctgctgcagcagcagatgagcagcgggcaggacgccgtgctgctctactcggccatggcgctggagaacctgtcgctgcagtcggcgaggctcacggacgtgccggagccgccgccgccgcctgggagcctcctcatgtgcgggtgcttcgggggccccaggcacaggcacgggcacggcaagcagccgcagccgcagctgcccggggccatggggacgtgccgcgtccacggcggcttctgctcgctgcgggagacgttctgcctggcggagagcgggtgcaaggcggtggagcggctggtggcgtgcctggagcacgcggatgaccgcgtggtggaggcggcgctggcggccttgtccacgctggtgggggacggcgtggccaacgcgacggagggggtgctggtggtcggggaggcggaggggctgcgccccgtggtggaggtgctggtggagaaccggacggaggcgctgcagcggcgggcggtgtgggccgtggagcgcatcctgcgcgtcgaggacatcgcgctggaggtggctgctgaccagaccgtggcctccgcgctcgtggaggcctaccgcaacggcgacgtccgcacccggcagacggcggagcgcgcgctccgccacctggacaggatccccaacttctccagcgccttccaccaggccaaaggcagggcatgaatcaacttcttcctccatttgttgattgatttgccaaaccagactgagtgtctgtgtacgctgatatatataaattgtgtatgtatgcatatatgtccatggcgcatgcacattcattttgttgatccgtgcgtctttgtgtttataaaaccaccattccattgatttggg

SEQ ID NO: 577 - DNA, 2483 bp, Sorghum bicolor
atggcggggatcgacctcaacgacaccgtggaggaggacgaggaggaggcggagcccggcaaccccgcctgctcccagcaaagccggaccagctccgcggccacgcccccacccccgccgctgaccccgctgctccagccgaggccgggcgccgcggtgtgcctcgagctctggcacgcctgcgccggccccgtcgcgccgctgccgcggaaagggaccgtcgtcgtctacctcccgcagggacacctggagcacctcggtgacgccgccgcggccgcagccggaggcgcgccggcgcccgccgccctgccgccccacgtcttctgccgcgtcgtcgacgtcactctccatgcggacgcgtccacggacgaggtgtacgcccagctcgccctcgtcgccgagaacgaggatgtcgcgaggcggctgcgcggagggtccgaggacgggagcgctggggacggcgacgacggggaggccgtgaagcagcggttctcgcggatgccgcacatgttctgcaagacgctcacggcctccgacaccagcacgcacggcggcttctccgtgccgcgccgcgccgccgaggactgcttcccgcctctggactacagccagcagcggccgtcgcaggagcttgtcgccaaggatttgcacggaaccgagtggaggttccgccacatttatcgaggccagccccgcaggcaccttttaaccactggatggagtgcatttgtcaacaagaagaagcttgtctcaggggacgctgtactatttttgagaggtgatgatggggagctaagacttggagtgcgccgtgcagctcagcttaaaaatggatctgcttttccagctctttataatcagtgttctaatcttggttcactagctaacgtagcacatgctgtggccacaaaaagcgtgttccacatctactacaaccccagattaagccaatctgaattcattataccgtattcaaagtttatgaagagcttcagtcaacaattttctgctggtttgaggttcaaaatgagatatgagagtgatgatgcttctgaaagaagatgcactggggtaatagcaggaattggtgatgctgaccccatgtggcgtggttcgaagtggaaatgtttgatggtccgatgggatgatgatgtagattttcgtcgaccgaacaggatttctccttgggagattgagctgactagttcagtttcaggatcccatctgtctgcaccaaatgcaaagagactcaaaccatgtcttcccccggactacctagttccaaatggaagtggttgtcctgattttgcggaatctgcccaattccacaaggtcttgcaaggtcaagaattattgggttatagaactcgtgacaatgctgctgttgcaacttctcagccatgtgaagcaaggaacatgcagtacattgatgagcgaagttgctccaataatgtgagtaacagtatcccaggggttcctagaattggtgtcagaacaccactaggaaaccctaggttttcctaccattgctcaggctttggggagtctccaagattccaaaaggtcttgcaaggtcaagaagtatttcaaccctaccgaggaactctagtcgatccaagtttgagaaatagtggctttcatcagcaagatggttctcatgtgcctactcaagcgaataagtggcatccacagcttcatgggtgtgcttttcgtgggacacaagcaccagctattccatctcaatcctcatcgccaccatctgtcctaatgtttcaacgagataatccaaagatgtccccttttgaatttgggcattgtcacatggataagaatgaggatatgcgtgcaatgtttggccatgctggaggtattggaagaactgagcaaacaatgatgctccaggctcataatgtttctggaggaatgggaaatagagatgtgaccgttgagaaatttcagcccactgttgctgttggaagggatggatcagacaacagggaagttaccaaaaatagttgcaaaatatttggcatatctttgactgagaaggttccagcaatcaaagaaaaggactgtggtgataccaactatccatcccccttcctgtctttgaagcaacacgtgccaaaatcgctgggcaacagttgtgccactattcatgagcagaggcctgttgttggtagggtgattgatgtttcaacagtggatatgatgatctgatctgttggaaaagttgtcctgaaggctgtattgtgtagtgtggatagtcaggtggttgatgatccggtatgatgaaggtggatggatcaacgacgctgatcaaacatgtatcctagttgtagctgttagagcactttgtatgacaaccgtgagtgctccatgttatcagcatttgttgctgcttacaacttgcctctatgtttataagccgtatgctatgacaaacccatttatagagtgtttatttgcattggcatagttct

SEQ ID NO: 578 - DNA, 2418 bp, Sorghum bicolor
atggcgggcattgacctcaacaccgtggaggaggaggacgaggaggaggcggaggcggaggcgccgcctgtggccgccagggccggtggtggcgccgtgtgtctggagctgtggcacgcgtgcgcgggccccgtcgcgccgctgccgcgcaagggcagcgccgtcgtgtacctgccgcagggccacctcgagcacatcggcggcgacgctgacgcggcgggagcagcggtgccgccacacgtgctctgccgcgtcgtcgacgtcaccctccacgcggacggcgccaccgacgaggtgtacgcgcgggtgtcgctgctgcccgaggacgaggaggcggagaggcgggcgcgggcgcgggttcgggaggacgaggacgcggatcgcgacggcgaggacggggccgccatgaagccgctcgcacggacgccgcacatgttctgcaagacgctcacggcctctgacaccagcacgcacggcggcttctccgtgccgcgccgcgccgccgaggactgcttcccgccgctggactacagccagcagaggccgtctcaggagctcgtggccaaggatctacacggcacggagtggaagttccgacatatctaccgaggccagccacgaaggcatctcttaaccactggatggagtgcatttgttaataagaagaagcttgtttctggcgatgcagttctgttccttcgaggtgaagatggagtgcttcgactgggagtgcgccgagcagcccagctaaaaattgtaactcctattcctgcactgcataaccagtgctcaagccagaccactctgggaaatgttgcacaagctgtggccacgaggactgttttccacatttactacaatcccaggttaagtcaatctgaattcattgtaccctattggaagttcaccagaagcttgaatcaaccaatttctgttggaatgagatgcagaatgcgatatgaaagtgacgatgcttctgaaagaaggtgcactgggataataattggaagcagagaagctgagcctatttggtatggttcaaaatggaaatgcttggtggttagatgggatgatggtatagagtgccattggcccaatagggtatctccttgggagattgaggtcacaggatcagtttcaggatctcatatgtgcgctcccaattcaaaacgtctgaaaccatgcctccctcaagttaatccggagattgtgcttccaaatggaagcgtttcttcagattttgcgggatctgtcagattccacaaggtcttgcaaggtcaagaattgttgggtttgaaaacccatgacggtactgctatttctgcttttcaggcaactgaagcaagtaatttgcagtacagtgatgaacgtagtaacatgagtaacaatatcttagggatcccaaggctcggtgttagatctccaaatggaatccctggatttccctaccattgctcaggctttggggaatctcaaagattccaaaaggtcttgcaaggtcaagaagtgtttcgtcctttccgaggaggatgtttggctgatggccatataagaactgctggcatgtatcaacctaaatggcctgcaccacaagggtgtgattttccacagccagcaaaaccggtacttgtgttgcaagcatcctccccatcatctgtgctgatgtttccacaaactggttctaagataactccattggaatatgagtacagctgcctggataaggatgaggatggtagatttgataggactgtccctactcaagatatgggaagaaacaatcaaacattatctctttggcctcatcttgtttccggcgaagcaatagaagaatgtactggaactgagaatatgcactcttctgtcagtggtgcagagcatgaatcaaacaatgagagtacagttgaaaatggctgcaaaatctttggtatctcattggctgaaaagatccgatcatgtgatgaagcagactcttgtagtgcaaaacgtaattctgggctccagccttcgaggtcacaaatactaggcagctgttgggccactgttcatgagcacagatctgttgttggcagggtggttgatgtctctgcaacggatatgatgatctgatccatatggcgttcttgtagacgatgcagaaatgacaaccgactgcaactttcatggcctgaaccacatcctggatgaaagatagctaaaaggtgaccagatgattcttggaacacggatgtttgacaaatttgtaatgttcttttgggctttgaatatcttattattttaagcttcctagtaatcagcacttgtatcttaaggtgcgcgttatcgcaagttcttttagagggcttgtttggattagcaccatttcccaattactcgtcgcattgttttttttgcccccggtaaacaagcccgtttctt

SEQ ID NO: 579 - DNA, 1839 bp, Zea mays
ctgattctgattctgattccagccaccctgaccggcgaagcgcggctgacatttcccccccaccataccgccaccacctgagaagagatcgatccaatcagattaaccaattagcagggagggaggagaggggcaaaggcaatggccgggacggaggtggaggacccgccggcggcggcgttggaggtgcccgcgaaacgcggccttctgcggtacaactcgccgctggcgcaggtgtccctgctgggcctcatctgcttctgctgccccggcatgttcaacgcgctgtcgggcctcggcggcggaggccaggtcgaccccaccatcgccgacaacgccaacaccgcgctctacgcctgcttcgcggtgttcggcgtgctgggcggcgccgcgcacaacctgctgggcccgcgcgcgacgctgctggccggcgcgctcacgtacccgctctacgccggctccttcctctactacaaccaccgcccgggctcgcaggtgttccccgtcacggcgggcgccctgctcggcgccggcgcgggcttcctctgggcggcgcagggcgccgtcatgacgtcgtacccgccgcccaaccgccggggcacctacatctccctcttctggtgcctcttcaacctgggcggcgtcctcggcggcctcctccctttcgccctcaactacaaccgcggggacaagaaagggagcgtcagcgacggcacgtacatcgccttcatggcattcatgctcgtcggcgccgcgctcaccgtgctcgtgctgccgcccgccaggatcgtccgcgacgacggcaccagggccaccagggtcaccttctcctccccggccaccgagggcgccgagatcctcaagctcttcgccaactggaagatgctgctcgcgctgccggccgcctgggccagcaacttcttctacacctaccagttcaacaacgtcaacagcggcctcttcacgctccgcaccaggggcctcaacaacgtcttctactggggcgcgcagatgatcggctccgccggcatcggctacttcctcgacttcggcttcgccagccgccgaaagagggggctgttcggggtcgccgccgtcgccgccgtcggaacggccatctggggaggcggtctggccaaccagctcagctacaatgccgtgccggtgcccgaccccatcgatttcaaggacggccaccgctacgccgggcccttcctgctctacttcagctacggactgctagatgccatgttccagagccttatctactggatcatcggcgcactcgccaacgactcccaaatcctcagcaggtacgtcgggttctacaagggggtgcagagtgcgggagcggcggtggcatggcaggtggacaggcgccacacgcccctcatgtcccagctgatcgtcaactgggggctcatgaccatcagctaccccttgcttgcgctgctggtgttcctggccgtgaaggacgagagctactcggtttcgtcggtggaggacggccgggagaaggacagcaagctgtccgcgccgaccagcttccactgatgaagaagaagaaggatagaccaagatgcacgtcactgtaattgtaacacggtgtttccatccaagtaagttttagtagtagaaatcaagaaacaactggagcatactcagggtgtggcgttcgtttttaagtaagttgtagtagtattcgttttggtgattgttatttattatagcacctctgggttagcttgagcatcatgcttccttgtcagtggtgtgaccaagaaattggatagaatctatatgaaggaattcttttgctatttaaaattgttctctctc

SEQ ID NO: 580 - DNA, 2096 bp, Zea mays
gcaactctggatagctgcttatcggagcctagagctagaggttgaaccagtccatcatcaactagcgtggccggccatggcgatctcctctgctcttccatgctcctccctcctcatggcggctgcccaactgaagctcctcgcctccgttgtcgtccaagtgcaaggcatcacgaggcactacgacttcaatgtgaccatggcgaacgtgacgcggctgtgcgccaccaagagcatcgtcacggtgaacgggcagttccccggccccaagatcgtcgcgagggaaggcgaccgcctcatcatccgcgtcaccaaccaggcccagcacaacatctcgctgcactggcacggtatccggcagctgcgcacggggtgggcggacgggccggcgtacatcacgcagtgcccgatccagacggggcagagctacgtgtacaactacaccgtcgccgggcagcgcggcacgctgtggtggcacgcgcacatctcctggctgcgcgccaccgtctacgggcccctcgtcgtcctgcccaggcccggcgtcccctacccgttcccggcgccgtacaaggaggtccccgtcatcttcggtgagtggtggctggcggacacggaggtggtggtcgagcaggcgctccagctcggcgctggcccgaacgtctccgacgcccacaccatcaacggcctgccaggaccgctctacaattgctctgccaaagacacgtacaagctgaaggtgaagccagggaagacgtacatgctccgcctcatcaacgcggcgctcaacgacgagctcttcttctccgtcgccaaccactcgctcaccgtcgtcgaggtcgacgccgtctacgtcaagcccttcaccgtcgacaccctgcccatcgccccgggccagaccaccaacgtgctcctcgcagccaagcccttctacccgggcgccaactactacatgtccgccaagccctactccaccgccaggccggccaccttcgacaacaccaccgtcgccggcatcctcgagtacgagtaccccgacgcgccatcctcctccgcggcgagcttcgacaaggccctgccgctccacaggccgaccctgccgcagctgaacgacaccagcttcgtcggcaacttcacggccaagctccgcagcctcgcgacgccgcagtacccggcggccgtgccgcggacggtggacagagcgttcttcttcacggtggggctcggcacgcacccgtgccccgggaacgccacgtgcctgggccccaccaacacgacgcagttcgcggcggccgtgaacaacgtctccttcgtgctcccgaccagggcgctcctgcactcgcacttcgccggcctgtccagcggcgtctactcgtcggacttccccgtcgcgcccctcacgccgttcaactacacggggacgccgccaaacaacaccaacgtggccagcgggaccaagctgatggtcgtcccgtacggcgccaacgtggagctggtgttgcagggcaccagcatcctcggcgtcgagagccacccgctgcacctgcacggcttcaacttcttcgtcgtcggccaaggctacggcaactacgacccggtgaacgacccgcccaagttcaacctcgtcgaccccgtcgagcggaacaccgtcggcgtgccagccggcggctgggtggccatccgcttccttgccgacaaccccggggtatggttcatgcactgtcacttggaggtgcacacaacatggggcctcaggatggcatggttggtgctcgacggcagcctcccgcaccagaagctgctcccaccgccgtccgatcttcccaaatgttgattagactcccctctatatatcctgtgctggtcgcttcaaagggaactgtgaattagacttgatcacaatgttgatttttttgtttactttcttcattgccaattgcaattctttcaacttccattttaactagtccgttctattcccatctgacctggactttttgtaattttttcttccatttgcttaccaccctgtaatgataaatgtgtttggtacactattttgagaacaacgaatggcgcggcttgcaccagagatccat

SEQ ID NO: 581 - DNA, 2192 bp, Zea mays
aacacacacatcgttcttcttcttcttcctccgtctcttcgatcgcctggccggccgtgtcgtcccccctctactagacctcaagagcaactctggatagctgcttatcggagcctagagctagaggttgaaccagtccatcatcaactagcgtggccggccatggcgatctcctctgctcttccatgctcctccctcctcatggcggctgcccaactgatgctcctcgcctccgtcgtcgtccaagtgcaaggcatcacgaggcactacgacttcaatgtgaccatggcgaacgtgacacggctgtgcgccagcaagagcatcatcacggtgaacgggcagttccccgggcccaagatcgtggcgagggaaggcgaccggctcgtcatccgcgtcaccaaccacgcccagcacaacatctcgctgcactggcacggcatccggcagctgcgcacggggtgggcggacgggccggcgtacatcacgcagtgcccgatccagacggggcagagctacgtgtacaactacaccgtcgtggggcagcgcggcacgctgtggtggcacgcgcacatctcctggctgcgcgccaccgtctacgggcccctcgtcatcctgcccaagctcggcgtcccctacccgttcccggcgccctacaaggaggtccccgtcatcttcggtgagtggtggctggcggacacggaggtggtgatcaagcaggcgcttcagctcggcgctggccccaatgtctctgacgcccacaccatcaacggcctgccagggccgctctacaactgctctgccaaagacacgtacaagctgaaggtgaagcccgggaagacgtacatgctgcgcctcatcaacgcggcgctcaacgacgagctcttcttctccgtcgccaaccactcgctcacggtcgtcgaggtcgacgccgtctacgtcaagcccttcaccgtcgacacgctgctcatcgcgccgggccagaccaccaacgtgctgctcgccgccaagccatcctacccgggcgccaactactacatgtccgccgcgccctactccacggccaggccggccaccttcgacaacaccaccgtcgccggcatcctcgagtacgagctgtaccccgacgcgccccggccctccgcctccgcggggagcttcaacgaggccctgccgctctacagaccgaccctgccgcagctcaacgacaccagcttcgtcggcaacttcacggccaagctccgcagcctcgcgacgccgcggtacccggcggccgtgccgcggacggtggacaggcggttcttcttcgcggtcgggctcggcacgcacccgtgccccgccaacgccacgtgccagggccccaccaacaccacgcagttcgcggcgtccgtcaacaacgtctccttcgtgctccccaccaaggcgctgctgcactcccacttcaccggcctgtccagcggcgtctactcgccggacttccccgtcgcgcccctggcgccgttcaactacacggggacgccgcccaacaacaccaacgtggccagcgggaccaagctcatggtcgtcccgtacggcgccaacgtggagctcgtcatgcagggcaccagcatcctcggcgtcgagagccacccgctgcacctgcacggcttcaacttcttcgtggtcggccaagggtacggcaactacgaccccgtcaacgacccgtccaagttcaacctcgtcgaccccgtcgagcgcaacaccgtcggcgtgccggccggcggatgggtggccatccgcttcctcgccgacaaccccggggtctggttcatgcattgccatttggaggcgcacacaacatggggcctcaggatggcatggttggtgctcgacggcagcctcccgcaccagaagctgctcccgccgccgtcagacttacccaaatgttgattagactcttcctctatctctatcctgccggtcgcttcaaattaaagggaattgtgaattagacaaatgtttgtttgtttttttgtttactttcttcattgccaattgcaattttttcaacttgcattttaactagtccgttccgttcctagctgacctggacttttttgtaatttttttcttccatttgtttgccaccacaaatgtttttgtacactcctctgaaaataaagaatggcgtgacttgcaccagataaaaaaaaaaa

SEQ ID NO: 582 - DNA, 263 bp, Zea mays
atggcaacggcgtttgtcccgtccgtctctgcgatggccaccgccgctgccgctccaacgtctgtggcgccgtcccctgcgccaaaggccaacaacagcaggaaggcggcggtgcctgggatgactgggtacgagctgctcaagcgcgtgaaggagtcggcggcgctcagtgacatcctcgtcgtcatcatgtcgtcggagaacgtgcccaaccgcatcacccgctgcttggaggagctcgacccgcgcctcgctgtaattta

SEQ ID NO: 583 - DNA, 1616 bp, Zea mays
ctgcctcctcctacccttccctcgctgaagccctctcgcgcctcctcccactcccactggacagagaggaggttagtggaaggcgggctaggaggctacgccgccacagacgcgaagcgatagcgtcggggggaagcaaggaagcgggtggcaatggcgaccggcggcggcggtgggagcgacgacttccacgggctcacgttcggccagaagatctacttcgagcaggacgcgggcgccgccggggggagcgcgacgggcggcaggaaggggaagggcgccgcggcgtccgcgagcgccgcccagccgccgcggtgccgggtggacgggtgcggcgtggatctgagcgccgtcaagcagtactactgccggcacaaggtgtgctacatgcactccaaggagccgcgcgtcttcgtcgccggcatcgagcagcgcttctgccagcagtgcagcaggttccaccagttacctgaatttgaccaagggaaacgaagctgccgccgccgcctcattggtcacaacgagcgccggaggaagccaccacctggaccactcacctcacgatacggcccgcttgctgcatcactagttcaagagcctggtaggttcaggagcttcctgctcgacttctcgtacccgagggttccaagcagcgtgagagatgatgcgtggcaatggcaagggatgcagcatggcggcgacaggatgctgctgggtaccgccagcgccatccagtggcatgggaaccaagaacctcacccaccacatcgcagcgcagctgcgggctatggcaaccatgcgtacaacaactgccatggtggcggcggcttggtagcagcagcagcgggggcgtcaatgctctcctctgccttcgagcccccgcctggcggtggcggatgtgtcgcaggagctaccgcggccgactccagctgtgctctctctcttctgtcaactcagccatgggatacgcccacccaaagtggcagcagccaccacaaccggtccccagcgatgtccgcggctgcaggcgccttcgaagtggcgccgtcgtccgtcgtggcgagcagctacacggcgtcgagctcctggtctggctcacgggaccctgccgacggcgccaggaaaaacgcgcagcgtcacgatgatggcctgcacctggtccatccaccaggccccgtccaccacggccacttctccggcgagctcgagctcgccctgcagggaagcggcccgccgcatgtcgaccatggcggcggcacctgcttcagccattctgacaccaacgcgatgaattggtccctgtagggacaacaacttttgccgccactgccttgatccggtcggcacgccacgagacatggagcacttgggattgggacaccctggttttgtgcccctgaccttgccgttctggtttttcagggtggaactaactgggattccctaggcgtagatcatgaatcccctttccccgtgtaacccattgcgtccatgaagtcggcccaacaccggatcatatataattctacaactcccataacctaaatcattcttcagttgtgaagatatatgcttgtcaagtgacctggttttattttatctgccatcaattcatc

SEQ ID NO: 584 - DNA, 1590 bp, Zea mays
cactgccgcctaccctcgttgaagcgcgctctctcgctctcgctctcctcgcgcttcctcccactcccactggacagagaggagggttagtggagggcggggtaggaagctaccgccgccacagtaacagcgttagctaggggggaagcacggaagcgggaagcaatggcgaccggcggcggcagcagcaggagcgacgacgtgcgcgggctcaagtttggcaagaagatctacttcgagcaggacggcgggagcgggagcggggcgggggcggtgggcggcaggaaggggaagggcgtggccaccggtggcgcgaggccggcgtccgccgcctccgcagcccagccgccgaggtgccaggtggacgggtgcggcgtggatctgagcgccgtcaagcagtactactgccggcacaaggtgtgcaacatgcactccaaggagccgcgcgtcttcgtcgccggcatcgagcagcgcttctgccaacagtgcagcaggttccaccagctacatgaatttgaccaagggaaacgtagctgccgccgccgcctcatcggtcacaacgagcgccggaggaagccaccacctggacctctcacttcacgatatggccggctcgctgcatcacttcaagagcctggcaggttcagaagcttcctgctcgacttctcgtacccaagggttccaagcagcgtgagggatgcgtggccaggaatccagcacggtggcgacaggatgctgggcaccgtccagtggcatgggcaccaagaacctcctcacccacaccgcagtgcagctgctggctatggcaaccatgctgcatacaactgccatggcggcttggtagcaggcggggccccaatgctctcctctgccgcctttgagctcccgcctggcggatgtgtcgcgggagttgccgccgactccagctgtgctctctctcttctgtcaactcagccatgggacacgacctcccacgaccaccggtccccagcaatgcccgcggccggcgccttcgacggcaccccggtggcgccgtccgtcatggcgagcagctacgcggcgtcgagcgcctggacgggctcgcgggaccccgctgccgacggcgccaggaacgcgcagcgtctcgacgatgctctgcacctggtccacccaggctccgcggcggtccacttctccggcgagctcgagctcgccctgcagggaagcggcgggccgccacacctgccgcgcgtcgaccatggcggctccggcggcggcaccttcaaccattccaccaccagcgcgatgaactggtccctgtagcagcactgcctgccttcatccggtcgccacgccacgagatgtggagggagcacttttgcattggacaccaccctggttttgtgcgccttaccttgccgttctcgttttttcagggtggagaaactgggattcctaaccatagtagatctaccgtgaattcccttcccgtgtagtagcgcattgcgtccatgaactcatttgatcgatcgtcgtgtcaccgtgtgcgtaactgcgtatctgtttggcgtaactgcgtatctgtttgttgaatctttccgaacattgcgg

SEQ ID NO: 585 - DNA, 1878 bp, Zea mays
ccgcctttcacaaaaccaaacaaaacgcacccgcaatataaagaggagaccaaggcgtgaagtggaggaggcagaggtggacgaggcgcgccaccgcccgagccgaatcgagctgcagaaaccaccttggcatggcgacacaggccgctttcctcgcagggttctcgcagctcgccgcgcagccgggccgcgaccgcgccgtggcggtggcggtggcgccggcgccgggcccggcccgggtggccgttgcggcggtgggtagcgccaagttgggcgtgaaggcggggacgtccaggaccgcggcggtggcgcgcctcggggtgcggtgccgggccagcctgatcgagcccgacggcgggcggctggtggacctggtggcgcccgaggagggcgggcggcgcgcggcgctgcggcgggaggcggcggagctgccgcaccggctgcgcttgggccgcgtcgacaaggaatgggtccacgtcctcagcgaagggtgggcgagcccgctgcaagggttcatgcgcgagcatgagttcctccaagcacttcatttcaatgccatccgcggccaggatggcaggatggtcaacatgtccgtccccatcgtgctctctgtcggggacgcacagcgaagggccatccaggccgacggcgccacgcgcgtcgcgctcgttgacgagcgcgaccgccccatcgccgtcctcagcgacattgagatctataagcataataaggaagaaagggtagcacggacatgggggacaactgcacctggattaccttatgtcgaggaggcaattaccaatgctggtgactggttggttggtggggacttggaggttatagaaccaatcaagtacaacgatggtctagatcagtatcgcctgtctccagcacagctgcgtgaagagtttgccaggcgcaatgctgatgcagtatttgcctttcagcttcgcaatcctgtacacaatgggcatgctcttcttatgaccgacacacgcaaacgtctccttgagatgggttataaaaaccctgttcttctgctccatccactgggaggattcacaaaagcagatgatgtgcctcttagttggagaatgaagcaacatgagaaggttcttgaggaaggtgtcctcaacccagaatcaactgttgttgcgatctttccctctccaatgcattatgctgggccaactgaggtgcagtggcatgctaaggctcgtattaatgctggtgcaaatttctatattgttggaagggatcctgctggtatgagccatcccacggagaaaagggacctctatgatgctgaccacgggaagaaggttttgagcatggctcctggcctcgagaggctcaacatccttcctttcaaggtggctgcatatgacacaaagcaaaagaaaatggatttcttcgatccatcaaggaaagatgatttcctcttcatctctggcacaaagatgcgcactcttgccaagaaccgcgagagtcccccggatggttttatgtgcccgggtggctggaaagtgctcgttgaatactatgacagcttggtgccatccgagggcagcagcaagctgcgcgagccagttgcagcctgaaatatgggaagcgcttcagataaggaaccgtactatgtcagcacaagcggttctttgcgacatagaaccgttgttgtatgattgtatactggcttgtaagacttaaaaacactgggcttgatttggacgttaatgtgtgcattgtaactggtgtgccctatctgctgacagtgttgcacatcacatgtttggtgttaataaggacagactatgtatcatctgccagattgttgtacatatacattgtggtgatataaacatgaagctgtcttctgct

SEQ ID NO: 586 - DNA, 1878 bp, Zea mays; identical to SEQ ID NO: 585

SEQ ID NO: 587 - DNA, 2808 bp, Sorghum bicolor
ccccgacccgaacctgctcgccgtcgcctccgcttggtctcgctctcgccgcattcgtcttccccgcccgtcccgtcccgtcccctgatctcagatccagaccaaacgaactccgcactaaacccccccttgccccaggcggcgcacgcatgaaaccctagtgaccccatacagatctccgcgtccggatcactgcgcggcgccaccatggcgacctctgcgctggactccctcccggcgccgctccggtcgctgcggctcaagacgaagcagcaggagctcctgctccgcgtctcggcgctggcgctcatctacgtgctcgccttcgccgtccgcctcttctccgtcctccgctacgagtccatgatccacgagttcgacccctacttcaactaccgcaccacgctcttcctcaccgagaacggcttcagcgagttctggaactggttcgactccgagagctggtacccgctcggccgcgtcgtcgggggcacgctcttcccgggtctcatggtgaccgccgcactgctccaccgcctcctccgcgcgctctccctcgccgtccacatccgcgaggtctgcgtactcacggcgcccttcttcgccgccaacaccacgctcgtcgcctacgccttcggccgcgagatctgggactccggggcggggctcgtcgccgccgcgctcatcgccatcgttcctggctacatctcccgctccgttgcggggtcctacgataacgagggcgtcgccatcttcgccctgctgctcaccttctacctcttcgtgcgcgccgtcaacacggggtcgctcgcctgggcgcttgcctcggcgttcggctacttctacatggtgtcggcgtggggaggctacgtgttcatcatcaatctaatcccactctacgtgcttgtgctgcttgtcactgggaggtattcgcagaggctctacgtggcctacaattgcatgtatgtgcttgggatgttgcttgcgatgcagatccgttttgttggattccagcatgtgcagtccggggagcacatggctgctatgggagtcttcttcctcttgcaggttttcttcttcttggactgggtgaaatacctgctaaatgatgccagactattcaagtcattccttcgaactactcttacatgtgtgattactgttggcaccctggctcttggaattggtactgcatcaggttacatctccccttggacaggacggttttactccctgcttgatcctacctatgcaaaggaccatataccaatcattgcgtctgtttctgagcatcagccaacagcatggtcatctttcatgtttgacttccacatcctccttttcctgttcccagctggcctttatttctgtttcaaacgcctgtcagatgccactatattcattgttatgtatggcctcacgagtatgtactttgctggtgtgatggtccggttaattcttgtggcagcaccagccgtttgtcttattagtgctattgctgcatctgctacaataaagaatctgaccactttgatccgggcaaagagcagaagtccacagactacttctggaaaaacaactggctcaaaggcagctgcaaagggtgcagttgatcaaagtttaccattccaacacaatgcagctattgctcttcttctgggtgccttttacttgctaagtaggtatgccatacactgcacttgggtgacatctgaggcttattcttctccatctatagttttggccgcaaggggtcataatggtggaagagtcatctttgatgattatcgtgaggcatactattggcttcgtcagaacactcctcctgatgctaagattatgtcttggtgggactatggataccaaattacagctatgggtaacagaactgtcattgttgataataatacatggaataacacacacatagctacagttggacgtgctatgtcatcttatgaagatgaagcatatgagatcatgcaatcacttgatgtgaactacgtgcttgttgtatttggaggtgttaccggatattcttcagatgatatcaacaagttcttatggatggtacgcattggtggaggagttttccctgtaatcaaagagccagattaccttgttaatggggagtatcgtattgacaagggggcagcaccaaaaatgctgaactgcctaatgtacaagctttgttactaccgatttggagaacttaccacggaatatggaaagcctccagggtatgatcgtgtaagaggagtggagattggcaacaaagacataaaacttgaatacttggaggaggcatttacaacttcaaactggatagtgcgcatatacaaggtgaaacccccaaagaacaggtcctgaggcatcttcgctagtgaaatggttagagctattacctcagacaagtacattattgtcaaaaatctgagtggcagatggcggggtggttgttattggcacctgctttggcgagactgactagtagccatagcatcagttcagctcaaaagtcaagaagatctttcccctcatttggtttaggtgtgatgggtgtcattcagaaccaagtgtgacaacagcgagtactttttgattgttaagcatgtcatgaccgaactttgaaagtttttgtaggcgcagtgacatatttgagtagaaaacttgtctttgatcaatgcaaggcaatgcaaattttccagcactaaacacaaaatatgaactgttggttctgttctctctattatgtgtttacatcatccagtgtaggcgcattgagcagtttttatgctgtctttcgtc

SEQ ID NO: 588 - DNA, 2265 bp, Sorghum bicolor
ctcagacgcagtgttccattccaacatttagctagccaacaaggatcatcggagctcgggctcaagtacttgttcttagctgacttcttcattgtaggaaacaatggctacctcctatctgctgccttgctatgtcctcatcactgtgctcgtgctcttcttctccgtcgacgttacggaaggggccatcagggagtaccagttcgatgtgcaaatgacgaatgtgacgcggctgtgcagcagcaagagcatcgtgacggtgaacggtcagttcccggggccgccggtgttcgctagggagggcgacttcgtcgtcatccgcgtcgtcaaccacgtcccctacaacatgagcatccactggcacggcgtccggcagctgcggagcgggtgggcggacgggccggcgtacatcacgcaatgcccgatccagagcgggcagagctacgtgtacaagttcaccatcacggggcagcgcggcacgctgtggtggcacgcgcacatctcctggctgcgcgccaccgtctacggcgccatcgtcatcctgcccaagcccggcgtcccttacccgttcccggcgccctacaaggaggtccccgtcatcttcggcgagtggtggacggcggacacggaggcggtgatcagccaggcgctccagaccggcggaggacccaacgtctccgacgccttcaccatcaacgggctgcctggcccgctctacaactgctctgcaaaagacacgttcaagctgaaggtgaagcccgggaagacgtacatgctccgcatcatcaacgctgcgctcaatgacgagctcttcttctccatcgccggccacccactcaccgtcgtcgacgtcgacgcggtctacatcaagcccatcaccgtcgacaccatcctcatcacccccgggcagaccaccaacgtgctcctcaccaccaagccgtcctaccccggcgccacctactacatgctggccgcgccctactccaccgccaggccgggcaccttcgacaacaccaccgtggccggcatcctcgagtacgaggaccccacgtcccctcccccgcacgcggccttcaacaagaacctcccggcgctgaagccgacgctgccgcagatcaacgacacgagcttcgtcgccaactacacggccaagctccgcagcctcgccaccgcggagtaccccgccgccgtgccgcaggaggtggaccggcggttcttcttcacggtcgggctgggcacgcacccgtgcgccgtgaacgggacgtgccagggccccaccaacagcagccggttcgcggcgtccgtgaacaacgtctccttcgtgctcccgacgacggcgctgctgcagtcgcacttcgccggaaagtccaagggggtgtactcgtccaacttccccgccgcgccgctcgtcccgttcaactacacggggacgccgcccaacaacaccaacgtggccaacggcaccaagctggtggtgctgccgtacggcgccagcgtggagctggtgttgcagggcaccagcatcctcggcgccgagagccacccgctgcacctccacggcttcaacttcttcgtggtcggccaagggttcggcaacttcgaccccgccaaggacccggccaagtacaacctcgtcgaccccgtcgagcggaacaccgtcggcgtgccggcggccggctgggtggccatccggttccgcgcagacaatccaggggtatggtttatgcattgccacttggaggttcacgtcagctggggcctgaaaatggcatggctggtgctggacggagaccgccccaacgagaagctgctgcctccgccgtctgatctccccaggtgctgaggcagacgacacgaggaattgctgcccggcctgcaggtcgccatcaacggccgtgatcgattgggcccggccggccgtcttggaacagggattgcgtgctctctaatttgcataggatatcttaatcatcttttggttgtgctggggttggtgttatgcgatgctttcattaatagaggtgtgcttttccgggttgagtcgtcgtctggttagctgtgtgagtgagagtcacacgggcaggaaggttcataccacttactcagtataaggcaaacgccatgtattttttgattgtttatgagttactgtactaccatcttttgtaaatcagattcttgtcgtcggggaactggatagtgtatccaggcgtgcctcccaaataatatgtttacgactatcagcattgttggaatttatttttg

SEQ ID NO: 589 - DNA, 1026 bp, Zea mays
ctttctgccaatcgcccatagcacccagccgcttggcctccctggtactcgctctccctcagtgctctggctcctgcttccctcgccagcgcgctccaatcccctgcacgcggagcttctcctctgccagtgctcctccatgtgtgcacggtccatcgctctcgcgtcgctcggtctgcgcgtccctgcgtccggatcctctccctccagctcggcgcccatccatgctgcgtcgccctctctctcatctccaagccgagaccctcgccgtgaagcttccatgtggccgcgcgtactccctctgcttctccctcgtggcgctcaaccttgccgagcttccttgccatggctcttccacagcccggctctgccccatcgtcgatcgcccatctccatggtcgcgcgccctccagttctatggccgtgccgcgcgtcctggagctcaccgcgcccggccaagctcccctgtgcacgcccagccactcctctctcccttgcagcgcgcgtccctctgcttgccaaagcaccagctcggtcgctccgttcgtgcttccgcggaggccgcagctcttcctctggtgcgcgcgccccatctccctggtgctcggccagctcacccatggcgcgccgtgctcctctgctctccccgccggcccgagctccctatggcgtgcatctccctggcaaaagctctctcttccctctcccatggcgcgtctcgagctccacctcgggtcgtcgtctccgagctcgaccccaaactgttgtgcgtcctatcctatctccgagtcgaggttcctgaaagtcgcctatagagggtgaatagggtgaatctgaaatttacaaacttaagcacaaactacaagccaggttagcgttagaaatagaaacgagtccgatagagagggcgcaaaacaaatcgtgagcgaataaagagcgagacacgatgatttgttttaccgaggttcgatttttgtaaacctaatccccgttgaggtggtcacaaaaactggatctctttcaacc

SEQ ID NO: 590 - DNA, 1631 bp, Zea mays
cgcgtgcacaggaccacgccctccctgctccatcttcccatcgctcgctcctcaagttcctagcgcccagctgaattcccctgcgcgcgccctatcttccaccatgtgccctgctcgcccatggcgccagccacagctcggagctccctctgcatccccaggcctgcgcctgctgcttgccccagcttggagctcgctcgacctccagctccggcgcccggctgagctccctggctgccgcgccctgctctcttttgctgctcaccggtgctccagctcgcggcgcccctgcttttctctctcctcctctactcccgccatggcgcgcgtctctgctccctcccccacggcgtgcccctcaagctcgtccaggccgcgacctcgtcgtggaccttcctcgccggcgctcctccctgctcagctctccagcgcgcgccccatctcgctgcgctcggcccccagctcggtcttcctcggtcgcgctcgctctggtcgtggacaccgtcgagctcagggccctgctcgccgtatgtccacgcatcatgcgtggagcaatgggggaaatctatagcctaacagcttgttcgctgcggcttgctgcggctgcaatccggctgcggctgcggcttctacagtatttttctctctatggattgcagctgcagcagtccaaacagctgcaacagtgtcggcttgcagcctgccgaacacgccctaagccttggtcaatgtctgtgtggatttgggaaagaagacggagatatggttgtagaagacagtgaagtcggcttgtgtcgcacgtctggtgctcgacgaaaagctcaaacatgagaccgtcatcgattcggttgtcgtccatctcaccaacatattttatccgtcgtggtttagctcgccatgggcctgctcattgtccctattttgccttccccaagaagccacgtggatggccttgccctcgccatcatcgttcggtcacctcgccttaatgccagcccctatatgatgcctccgacttgtgttcacgccgacaaaagaatcccaagaggatgtggagaagcaagcccctggtcgatgcccccaagtgctcagcgaaaggcctgaacaaggatcatcgtcatttttgcgaagttctagtactatggagagattccaagaattgtggattgaggagaaagtgaagctcagttcaatactcgtctggtgtttgatcgaagacttcaatcggagactgtcgtcgttctcgcaaatattgagtcaagttaattatggtgagccgattcagtatttttactattgattttatgatcgggaaataagacgcttagtttgcgtatgaagtttaagttagaaataccagtgatgcgaggtgtgcttcgatgagtttagttgccgagtatattcgaactagttctattttgcagagtgtagtgtctcggtgacgcgtaggttaagtttagtattttaagcaattatcgataagtctgtcgatgctaattgtgttcagtgcgcgtatgatgaaatcgatgtcctgtgctagtagttagtatcatctatgtttgtgatcgataatgttggagtcggatattgattagttagattgatagctatgaataaatagttgttatctg

SEQ ID NO: 591 - DNA, 1187 bp, Zea mays
accaacgccaccaaaaccaacactccgatggatgttttcaccaagcaactcctccccatgcctcaccagcgggaccccaactacccttcctcttccacctcttcctcctcgtcgtcgtcctcctccacgcccccatctcgccctcaccaccgtgcgcaaccccagccccacaacctcccccagtcccccagacccgtcccgcgcaccatcgacaccaccccgttccccaccaccttcgtccaggccgacaccacctcgttcaagcaggtcgtccagatgctcaccggcgccgagcagccggccaacaacgacgcgacgacggcgggcgcagccgctgccgctgccgccaacggcggtggcgccggcgcccaggcggccagcggtggaccgtgctgccggcccaagaagccgtcgttcaagctgtacgagcggcggagcagcctgaagaacctgaagatgatcgcgccgctggcgatgggctcgccgccgtcgccgtcgccgcggagggcggcgccggagatcctgtcgccgagcgtgctggacttcccgtccctcacgctcagcccggtgacgccgctcgccggcgacccctttaaccgctcgccggcgtcggcgtcgtcctccgaggaggccgagcgcgcggccatcgccgagaggggcttcttcctccacccgtccccgaggggcgccgagcccccgcgcctgctcccgctcttccccgtcgtctcgccccggatggccggcgccgcggcggcgccgtcgtccgagtgaagatcccccgacgcgggcgcgcgcctgctctaccgtagccgccgccgccgccaccaccaccaccatcagtactactactactacaacaaccgtcgccgtcgccgtaccgtccgtccttgtttcgtgaggtgcttgctttgctgttcttcttgatcgacgccgctgtaatttttgcccccttcttgcttttcttggaacgggcgaggaagggagttctctctctctctctctttttttttgcttcgtttcggagcggcgacacgcgagcgatcagcgatctgacgatccaggctcgctcggttcctgatcgctcgcgtcgcgggagcctccggccgggatgaaatgatgggatggatgaattagacagttaataattaatgaagcctaatctgaagatttgaaaaaaaaaaaaaaaa

SEQ ID NO: 592 - DNA, 1283 bp, Zea mays
ttcttgcgtggatgctcccctcttggctatttgtttgtttcttgcagaggaattttttcctgaacttgtcctcgccgtcttgaaggtttcttgtttgggagcaggcggaggcgtttctttccttcttcgccggcggcggcatggactgggcagcggcgtccgggtctccgtcgtggggcgcggcggcgacggaccccggtccgaccatgctgtccttcgcaggcccgtcctcctccgccgccgacgccgaggtgcggctccaggatttcgccgcgggtcttgcccagagctcgcggccgactggggcggcgccgggagccgggaggaggtcccgcgcggccgtgggaggtgccggcgcggaggcgtgctccgtcgacggctgccgctctgatctcagccggtgccgcgagtaccaccggcggcataaggtctgtgaggcacactccaaggcgccggtggtggtcgtcggcggacaggagcggcgcttctgccagcaatgcagccggtttcacatgctgtccgagtttgacgaggaaaaaagaagttgccggaagcgtctggatggccataataggcgtcgaagaaagccacagcatgatctgacaaatctagggggtttctttccataccaccaagtgaatcagtttgagttctacccacaaacaattccaacagttggccagaattcggacgccgtgcacttggtgggccgtcagcagcctttctccatatcgttctcaagaacaccagacgagttccctttcccacagggtggcggtagcagtgtgctgcaccacctccatgcagcccgccctggccatcacgctgaaggcagcagccacactggaagcagcacacgcgacaacgctctctccggcacactgggccccgagtgtgctctctctcttctgtcatcgtcgctgcgtcgcccctcaactgctggcgtccccgccgttggccaaccccaggttactgcctcttcgaccactgccgtgtcgcaggctgcaacggcagctgtggccactgctgcattcgcggccagtgctggccaccatgtgtttgttcctgatgctatgtttgaggatccatcacaggcactgccattctcttggcagtaggattgttttgttgtcctgtttttatgtgctcctgttgtgttctcgatcgatactctagtgtctgatggctgggaattcggggtacctgtgcacttgcagactcaggttgtggtccgtcagagatgtatacaagtgacacgacgactagtgctggcatctgaaagg

SEQ ID NO: 593 - DNA, 3129 bp, Zea mays subsp. mays
atagctatgttcccactactagtgacacactagacgttggtctgtgctgtacggagaacgaaggtataaacaaatgcgttgcaaaagtgcagttcgacgacgatagatgtatatgtatactccacaaaagcccgagctgtcttttgtttttggagaaaaaataaataacgtgtggttcaggaacaaaagctagcggggttgctactaattgctactgttgttgataaacacgtcctgatcagacgccacttgcttggatctgtattattattattattattattattattattattattattattattattattattattattatttcctttgctttctttttttgaactgattttttgtgtgttgcaataataatgttaaaagacaaaagtaacggcagggagttgcagatagacctaatatcaaaggctgtcagggcccttttggaacgcagggattttcacttcacaggtgcttttttttatgaaaatgaaccggttcttatgatttctttttttctatgtttcatcatacgagtggaactcgaacatccatcccaaatattagaagacaaaagtaacagtaggagagctgagaagcctgagatagacccaatatcaattaattaaagacttttatagcaaatccaaaaggatgcaaaaacacccccgtcaaaaaaataattattagggacaggttacatttttttggaggcaaatatggtgcatacttcaacagttttattcaaaacaaaggctaaaagaccgtaaaccgagcctatatttttttaaaaaaaaactagatccatctgccccattccgcaaacgattggggagacactacgtcgctcaaatatgtgtgggggggggggggggggagaacataggttgaaagcgggttaccgtatttttccaacaatgatgtgatccgtcgggcatatttggtgacaaggagatcccagaaggattggaggggattgagggggaaatgaactaatttccccctccattatcttgggagcccgggtcaccaaatcaactctaaatctgtctttcgggttgttttaagtgtttttggagttactcttatacgaatatgagtcatttttaaaaaaaaaagataaatcaaaatatacattagtctgtacatagagtgactgctctgaaaaaaataaaaaaactgtagagacaccttagccccaataattgtagcacaggcaacaggtgcacagcacaacatagccccttgcatgcatggctgcagtgtgacacatggcggtggggccctgcccactgttcctccttcagggacggaaaggttggttgcggccccaccatggcgccaagtaatatcgccgctgctctctctctcttttcatgcacacgctcctctctccctccctcccaccattgctacagtcgcagctgtctgtgtctgcaaagtactgactgctcccactccactccacccccagttccgggccactcgggcatcgtttctgttgctgcaaatctttgttggctgctggctgctgctgccttgctatctatctatacaccgcccgcaccttccattcctcctcctccgaagcagcaggcagcagctgcatcgcacctcacacctctcgtgtccatcgatccagccgccgccgcagctgcagctctcacttcactgttgctgtgccacctcctcgtcgcctgtagtgtctgtcgacagagaaacgcccgcggaatgagagggaaggagcggaagctgcagcgggcgcgcgcgtgcaagggctaggattaggagtagcggttgcaacgtcggcgcgcacggcgtacgtcgggcatggattgggatctcaaggcggcgggcgcgtgggacctcgcggagctggagcaggaccacgcggccgcggcgccgtcgtcggggggccacgccgccaatgctgccgcggcgggcacggggacggagagccgcccgccggcgcccggggcagcaggggcacccgccgagtgctccgtggacctgaagctgggcgggatgggcgagtgcgagcccggcgcggcccgcagggagagggaggccgcggcgggggcggcgaagcggccgcgccccgccgggcccggcgggcagcagcagcagcagtgcccgtcgtgcgcggtggacgggtgcagggcggacctgggcaagtgccgcgactaccaccggcggcacaaggtgtgcgaggcgcactccaagacccccgtcgtcgtcgtcgccggccgcgagatgcgcttctgccagcagtgcagcaggttccatctacttgcagagttcgacgccgacaagcgcagctgcagaaagcgtctggacgggcacaatcgccgccgcaggaagccacagccagacaccatggcttctgctagctttatcgcaagccagcaaggcacgcgattctcaccatttgcgcatccaagactggaggcgagctggccgccgggggtgatgaaaaacgaggagagtccatatcacatcactcaccaaatccctctgggatccagcagcagcggcaacaggcagcagcatttcgtggctctgggagccgccacgcctgcctacgccaaggaaggccggcgcttccctttcctgcaggagggcgagataagcttcgccaccggcgtggtgctggagccgcccgcgtcggctccagcgtgccagccgctcctcaggacgggagcaccatccgagagcagcggcgcaggcggcagtaagatgttctccgatcaggggctggctcgcgtgctcgactcggactgtgctctctctcttctgtcagcgccggccaactcctccggcatcgacgtcagcaggatggtccgcccgactgaacacgtccccatggcccagcagcccgtggttccgggcctgcagttcggcagcgcgtcgtggttcccgcgcccccaggcttccacgggcggctccttcgtcccctcctgccccgccgcggtggagggcgagcagcagctgaacgccgtgctgggccccaacgacagcgaggtgagcatgaactacggcgggatgttccacgtcggcggcggcagcggcggcggcgagggctcctcggacggcggcacctcgtcgtcgatgcccttctcgtggcagtag

SEQ ID NO: 594 - DNA, 1900 bp, Zea mays
gcgcactcgcataaaaaaatgttcgccacctttctcctgctgctgtggtcccatgccccggcgccggcgctctcgctgccgccgcgccctccggtacgctgcagcgatggcgggaccacgggctgcgtgctctccaacgcctacggcgcgtggtcgagcgaccgcgccgactgccccgtctcctccgtcgcgtacccggcgtccgagcaggaggtggtcgcggccgtggcgcgcgccagcgccagcggcgcccgcgtcaaggtcgtgagcggcttcgcgcacaccattccgaagctcgcctgccccggcggcggcaacggcactaccaccaccctgctcatcagcctcacggcggcgccgtactgggagggcgtcagcgtcgcggggctcgtgagcacagggtcccacggcagctcgtggtggggccgcggcggtgccgtgcacgaccacgttgtggggctcaggctcgtcgttaccgccggggaggctgacggctgggccagggtcctgacgctgcgcagaggcgacgagctcttcccggctgcgcttgtctcgctcgggctgcttggggtcgtctccaagatcacgctgtcactggaaccgaggttcaagcgcagcatcaccttcgactacaggaacgattccaccttccaggacgacttcgccgctcacgcggcgagccacgagttcgccgacatcacctggtacccgtcccagcacacggccgtgtaccgcatcgacgaccgcgcgccggccaacgcgcctggggacggcgtcaacgacttcatcggcttccaggcgacgcccatcgctgtcaccgccgggctcagagtggtagaaacttcactggagcggtccaagaacatgaagggcaagtgtgcgatggcggcggcggagggcgtggcgaagcggctggtcggcaacgggctgaagaacaacggcctgctgttcacggggtaccccgtggtggggtaccaggggaagatgcagacgtcgggctcctgcgcgcgctcctcggcggcggacctgctcagcgcgtgcgggtgggatcccaggttccacggcctcttcttctacgagagcacggcgatcttctcgccggcccggttccgggacttcatcctcgacgtgaagcgcctgcgggacctcgccggctcggacagcctctgcggcgtcgacgtgtacaacggcctcctggtccggttcgtgaaggcgtccgcggcgcacctcggccagccggaggactccgtcgtggtggacttcaactattaccgcgcgtcggactcggcggcgccgcggctgagccaggacgtgtgggaggaggtggagcagctggcgttcgtcaagcacggcgccaggccacactgggccaagaaccgtttggtggcgttcgccggcgtgcggggcaagtacccgcggtggggccagtttgcggcggctaagcggcagctggacccccggggcttgttcgacagcccgtggtcggacgaggtcgtcggcggggtggagctggccaagggcgacgggtgcgcgctggacggccggtgcgtgtgctccgaggacaggcactgcagccccgagcaggggtactactgcaggccggggctcgtgtttacggacgccagggtctgcaggtactcggggtcgcagaaccagtgagtcaccatatttctctgtggattggtttcgagcttgactgaaagctgtgagccgtgtggataatagatttcacatttaaagagtgcttgtagctatacgttagggtcataatacaaaaaggagaagaatttctgtaatattggcattctagaaattaaatcagtgacaatgaagaagttacatgtatcaaatatccttataaaggaagggaatcctaagaatatatgatttaaaatgctac

SEQ ID NO: 595 - DNA, 2234 bp, Zea mays
cagagatggggattgatctcaacgccgtgggggaggacgacccggcgggcgcggtgtgcgcggagctgtggcacgcgtgcgcgggggctggagtggcgctgccgcggcggggcagcgccgtggtgtacctgcctcaggcgcacctcgcggcgggcggctgcgacggtggtggggtgtcggcgccggccccgccgcgcgtgccgccgcacgtggtgtgtcgcgtcgtcgacgtcgagctacgcgcggatgcggccacggacgaggtgtacgcgcggcttgcgctggtggcgatggatacgatgtttggccgaaacatcaatgatggtgaaactgaagagaagaatggcgaggaagaggatggcgacggagaaaagaagcacgcatcacacatgttctgcaagacactcacagcttctgataccagcacacatgggggattctctgttccacggcgagctgcagaggactgctttccaccattggactatgagcagcttaggccttcccaagagcttattgccaaggatttgcatggcatgaaatggaggttccgtcatatctatagaggtcaacctcgaaggcatcttctgacaactggatggagttcatttatcaataagaagaaactagtctcaggggatgcagtcttgtttcttagaggtaatgatggtgagctaagattgggtgtgaggagagcagttcaactgaaaaatgaagctctacttgaagctgtcaactgtactgattcgaagctacttatgctgtctgctgtggccaattctttggacaacagaagtatatttcacatctgtttcaacccaagggttggtgcatcagaatttattgtgccgtattgcaagttcttgaagagcttgaactatcacttttcagttggaaccagatttaaagttggctgcgagaatgaagatgctaacgagaggtcctttggattgatcataggtattagtgaagttgatcccatacactggcctggatcaaaatggaaatctctcctgataaagtgggatggtgctactaagtacagccaccagaatagagtatctccatgggacatcgagggagttggcagctcagtttcagttactcaccgactttcctcttctgtttcgaagcgaacaaaactgtgcttccctccaagcgatttggacacgccaattctagatggaaacggtcgtccagactcagtggaaactgaacgtttccacagggtcttgcaaggtcaagaattggtgcactctagtattcatggtactgcatgctctcattcatcagatagccccagatgtcaaggctcttatggcaggagattctctgctgatgcgtggaactgcaagatgaatgatgtaatgagtgggcctcgacacctaaatgccactgggtttgcttaccagcccctaggcttcagtgaatctgtcaaattctcagaggtcttgcaaggtcaagaaatgtctcaggcggttccttccttcatgagatctgctttcaactctggcacgcagaatggcagggttcgaccatttgattatgtgcagagatcagatgcaactcaaggatacgctctccagcagtttaatctgccagcaacagaagtgcattcgccctcttctgttcttatgtttaaccaaaccatggtaccacatgctgagctagatggtgcgaccaaccgtgaagaagtacatggcagcaggtacttgtcatccaatgcaatagggagagaagctgaaccatggccatccatgcagcagcaaagagcgagtgtaaatggaagcgagcctctcgacacaactgaagcctcagctcctgcaaggaacgctgaatctggatcggtcggcaggggcgcggggcgaagcaactgtaagctttttggtttctccctgactgagaagatccttggaacggatggtggtggtgtgaaagaagggaactacgaagtggaccgtcaaactccccgggtgctagacttgtttgggcacggttctacgcctggagctctgcatgctctctgtgctgctcccttgggaatatgatgctgttctgcctagttttacaacagttagatttatgtaatccttcagccattttcatcgcgttgtacttgaccaatatgtccagcgtatgatttccagttttaattgtatgctgatgctacatatcctctcttgagatccatgcatgagaattctggcagaatgaacagaggtaaattgatgtcc

SEQ ID NO: 596 - DNA, 2043 bp, Zea mays
atggggattgatctcaacgccgtgggggaggacgacccggcgggcgcggtgtgcccggagctgtggcacgcgtgcgcgggggctggagtggcgctgccgcggcggggcagcgccgtggtgtacctgcctcaggcgcacctcgcggcgggcggctgcgacggtggtggggggttggcgccggccccgccgcgcgtgccgccgcacgtggtgtgtcgcgtcgtcgacgtcgagctacgcgcggatgcggccacggacgaggtgtacgcgcggcttgcgctggtggcgatggatacgatgtttggccgaaacatcaatgatggtgaaactgaagagaagaatggcgaggaagaggatggcgacggagaaaagaagcacgcatcacacatgttctgcaagacactcacagcttctgataccagcacacatgggggattctctgttccacggcgagctgcagaggactgctttccaccattggactatgagcagcttaggccttcccaagagcttattgccaaggatttgcatggcatgaaatggaggttccgtcatatctatagaggtcaacctcgaaggcatcttctgacaactggatggagttcatttatcaataagaagaaactagtctcaggggatgcagtcttgtttcttagaggtaatgatggtgagctaagattgggtgtgaggagagcagttcaactgaaaaatgaagctctacttgaagctgtcaactgtactgattcgaagctacttatgctgtctgctgtggccaattctttggacaacagaagtatatttcacatctgtttcaacccaagggttggtgcatcagaatttattgtgccgtattgcaagttcttgaagagcttgaactatcacttttcagttggaaccagatttaaagttggctgcgagaatgaagatgctaacgagaggtcctttggattgatcataggtattagtgaagttgatcccatacactggcctggatcaaaatggaaatctctcctgataaagtgggatggtgctactaagtacagccaccagaatagagtatctccatgggacatcgagggagttggcagctcagtttcagttactcaccgactttcctcttctgtttcgaagcgaacaaaactgtgcttccctccaagcgatttggacacgccaattctagatggaaacggtcgtccagactcagtggaaactgaacgtttccacagggtcttgcaaggtcaagaattggtgcactctagtattcatggtactgcatgctctcattcatcagatagccccagatgtcaaggctcttatggcaggagattctctgctgatgcgtggaactgcaagatgaatgatgtaatgagtgggcctcgacacctaaatgccactgggtttgcttaccagcccctaggcttcagtgaatctgtcaaattctcagaggtcttgcaaggtcaagaaatgtctcaggcggttccttccttcatgagatctgctttcaactctggcacgcagaatggcagggttcgaccatttgattatgtgcagagatcagatgcaactcaaggatacgctctccagcagtttaatctgccagcaacagaagtgcattcgccctcttctgttcttatgtttaaccaaaccatggtaccacatgctgagctagatggtgcgaccaaccgtgaagaagtacatggcagcaggtacttgtcatccaatgcaatagggagagaagctgaaccatggccatccatgcagcagcaaagagcgagtgtaaatggaagcgagcctctcgacacaactgaagcctcagctcctgcaaggaacgctgaatctggatcggtcggcaggggcgcggggcgaagcaactgtaagctttttggtttctccctgactgagaagatccttggaacggatggtggtggtgtgaaagaagggaactacgaagtggaccgtcaaactccccgggtgctagacttgtttgggcacggttctacgcctggagctctgcatgctctctgtgctgctcccttgggaatatga

SEQ ID NO: 597 - DNA, 803 bp, Oryza sativa Japonica Group
atggggagggggaagattgtgatccgccggatcgacaactcgacgagccggcaggtgacgttctcgaagcggaggaacgggatcttcaagaaggccaaggagctggccatcctctgcgacgccgaggtcggcctcatgatcttctccagcaccggccgcctctacgagtactccagcaccagcatgaagtcagttatagatcggtatggcaagtccaaggatgagcagcaagccgtcgcaaatcccaactcggagcttaagttttggcaaagggaggcagcaagcttgagacaacaactgcacaacttgcaagaaaatcatcggcagttgatgggcgaagatctatctgggctgaatgttaaggaattgcaatctctagagaatcagctggaaataagtctacgtagtgtccgtacaaagaaggaccacgtcttgattgatgaaattcatgaactgaatcggaagggaagtctagttcaccaagaaaacatggaattatacaagaagatcagtttaattcgtcaagaaaatgctgagttatataagaagatctacgagactgaaggaccaagtgaagtcaatcgggattcaccaactccttacaattttgcagtaattgaaaaaacaaatgttcctgtgcaacttggactcagcacactaccacaacatagtgacgccgaacaatcaactgctcctaagctagggttacagttgaatccatgaccagaaaaacattgttttgctacacccttgtatgctgaagggatactatttgctgtcaagagttgatactcagatcaaga

SEQ ID NO: 598 - DNA, 723 bp, Zea mays
atggggaggggaaagatcgtgatccgcaggatcgataactccacgagccggcaggtgaccttctccaagcgccggaacgggatcttcaagaaggccaaggagctcgccatcctctgcgatgcggaggtcggcctcgtcatcttctccagcaccggccgcctctacgagtactctagcaccagcatgaaatcagttatagatcggtacggcaaggccaaggaagagcagcaagacgtcgcaaatcccaactcggagcttaagttttggcaaagggaggcagcaagcttgagacaacaactgcacaacttgcaagaaaattatcggcagttgacgggagatgatctttctgggctgaatgtcaaagaactgcagtccctggagaatcaattggaaacaagcctgcgtggtgtccgcgcaaagaaggaccatctcttgatagatgagattcacgatttgaatcgaaaggcaagtttatttcaccaagaaaatacagacttgtacaataagatcaacctgattcgccaagaaaatgatgagttacataaaaagatctatgagactgaaggaccaagtggagttaatcgggagtcaccgactccattcaactttgcagtagtagaaaccagagatgttccagtgcaacttgaactcagcacactgccacaacaaaataacattgagccatctactgctcctaagctaggattgcaattaattccatga

SEQ ID NO: 599 - DNA, 1950 bp, Sorghum bicolor
gagccgctgaggataggggaggcatgcatgatagagacctcaaaggccaggtgagagctcagtcgacggtaatgctgtcgcagctcctttagttgccagacgattggcatgccacgattcctggtttcatctcgctgagttagtttgacttcaaggcttgtgcggtgttgctgattggcaacaagaggttcaggaataggcggaggatttggttgtgttctttctgtttcgtcagggaaagggatttgagttctgccagctttcacatacacaggttgggggagcagttgagattttctaattcttcttcttggcaggattgagatcttcagttctggtaatgggttctttcgggatgaactggaatcagaagaactccatggtgtgggattgggaacatctagtgccatctgtctcgaatgcagttacaaggcatggatctgctaattcatctggtggtactcttacttctagctcagagctagggcatggttcatccaagagctctatttcagcatccattgattcaccatctggagtagggaacagcttagagttcaattttgccgctgttcaaaggcatgttaagaacacgggcaccaatggcagagtcgatgactcagggaattctccatcgtcaatgatagccttcagccaaggagagccactgatcagcctcaagcttggaaaaagggcttacttcgaaaatgtctgtggaggacaggaggccaaggtttctgcaccttcagatgttacttctgcagtcaccgtggtcaagaagactaaggtgtctcagcagaatgcaaagaactggtactgtcaggttgaaggttgcaaagttgacctgtcttctgctaaagattacaaccgcaagcacaaagtctgtgtagctcattctaaagctcccaaggtggttgttgctggtctagagcgccggttttgccaacagtgtagccggtttcatggtttggcggagtttgatcagaacaaacgaagctgtcgtaggcgtcttactcatcataatgcacgaaggaggaagccacaggcagatgcaatttcattcaattcatcacggctctcgtcaatgttttatgatacaagccaccggacaaatcttttctttagtcaacctctctatggccaagtgagaagcaatgcagtatctccgtgggataactcgggaggcttcaaatttatggaaacaaaacatctgtcagtgcagccaacaaaaacagtaggcctggatgagctgcatttctcaaccccccagatatcaactagtgttgtggcgcacactggacatcatcataacttcgataggttcatgccattcaagggaactaacacaaaggttcttaaccaagtttcaggtgtggaagcttcggcgaccgcttccaactctaataacggagccccagaacctgggcgtgctctctctcttctgtcagacggttcttggggctcaaattcagccgtcatccagcagcctccttctcacgcagatgctggtgcattgccgcccctcgccaccgttgctgtctccaacaccgccgccaggcatcctcttgacccgtccctgggaaggttctggcaagacgatcatcccccactcgacggacctgcacctcagattcaggaactggcgcacctccgaacatggtgaaagtgaaagataaatgtatctgatgccatctcgaggacctggttgggaacttctggctaggcattttgatggcaatctgtggctctggtttgaatttgccggtgacagtctttggacaatgtttaatttagctgttttgatcagaacgggcacagacatgtttgcacaatgtgagttcctctatcattggggatgagtgaggtgaagatgcaggaacaataggagacaaaatcttaatttttttgctcgttttcccaccagtatttgaattattaattactaggacc

SEQ ID NO: 600 - DNA, 2027 bp, Zea mays
gtgaaattgaggaactgaaccccggcggccggagttcctcatttgatttcgctcagaaaagtagaaaacgccagccgaacacaccggtccgccgcccacgccagcgctgagctcaccaggaaaccgtcttcttccactggcgcgggctaggagcgtcgccgccgcgtcgcggttatgggtacggcggctgtcgtggaggacacgatacgcgtcgtcctcacctgcctccctgatccgcccttccgcaccaccggttcctcccgtccctaccagagtcccagcggcggcggcggcggcggggaccgcatcagccgcctctcagacgcggtgctctctaacatcgtggcgcgtctccccgccaaggacgcagcgcgcactaccgcgctctccaggcgctggcgccgcgtctgggcctccactccactcgtcctcgacgactccgacctcctcgtcttccacgacgacggcggctgctctacgcccaactggttagccgtcacagacaccgtgtcccacgtcctctcctcccacagggggcccatccgctttgtgcgcctcacctgctgctacatggcgctggcctcgcacaacggcgcgctccagtactggctccgggtcctcgctgcggggggagtcgaggatctcgtcctcgtcaaccgcccattacccacctccgtgggcctccccatcgacgtcctccacctcgcctccctccgcaccctctacctcggtttctggtgcttcccggacaccgccaccctcccgcgaggccgcgccaccgtgttcccctgcctccaggagattggactctgcgctaccgtcatccacgccagggacatcgaccacctgctcgcctgcagccccgtgctcgagaagttcgccagcatcaccagcatctacttcacagaccctgtccggatccgcagctgcagcctccggtgccttgtcttctgggagtccctggccaatgagctcgacttggtcgtcgccccgcgcctccagcgcctaatcctgtggcagtcgcgccaatggatgatcggctccgtccatttccgcagcaggatcaggattggctccgccaccgaactcaaggtgctcggctacctggagccaagcatccaccagctcgagattggcggcaccataattgatagtggaacaaagatgaccccatctaacatggttccaagtgtcaagatcttggccttgaagatgcagttcagaatccgcaaggaagtcaagatgctgcccaccttcctgagatgctttcccaatgtggagacattgcatgttctgtcacatgaaactgatgagcaaaatggcaagttcaatttgaagttctgggaggaggttggctccatcagctgcctagagacacgcatcaccaaggtggtgtttgacagattcagaggagagcgttgtgagctcgcgttcctcaagttcgtcctagagagggcagaatcgctgctgaagcttgtggttgtattggccaatggagatcaagcctcagtggatgagatgcttgctaagttgaagtctctgaccacggtgaaacgagccagcgatttccctactctgttggcagttgcccgtgagggtgacagcgcctggtactttgagagagcatccgatctttctgttactgaccccttcgatttgtgaagctcaaggcgatgacatattccatgaccaattctattgttctcctgagccaatcagttgttctttgtcattcagggtatacttgctaggcattccctagaatcttgtctcgtcttgtgttgactgtaaatgtgagtacagttctgagtgaatcaggagaggtatatagtttatggaaagcgctgcttgacatttcgctattgaaaatataggttctgcatagctgctcttgagttgactacctccaaatgctgtcactggctagtttctcagttgtgatgtactgcatactgggcatagttggaactggaaaatatcgtattggtaaccccagattctgtgtatcgttgatatgattctggttt

SEQ ID NO: 601 - DNA, 2398 bp, Sorghum bicolor
atgggcaccacagcgcggcgcgagccgctgaagcagcgcgtgaaccgctgcctcctcaagctttccgaccgcgacacagaggccatggcggccgccgagctcgaggccatcgcgcgcgcgctcgagcccgacgagctcccggccttcgtctcggccgtctccgacgcgcgccccaccgacaagaccccgctccgccgccacgcgctgcgcgccctggcgctcgtcgcggcgtcccacccgcgcgacgccgtggccccgctcgtcccgcgcatcctcgccgccgcgctccgccgcgtccgggaccaggactcctccgtccgcgccgcgctcgtcgacaccgcgcgcgccgcggcggcggcctccgcctccgcctccgccgcgctccggcccctcacggacgcgctccttcacgagcaggaccagtgcgcgcagctggcggccgcgctcgccacggccgccgccgtcgaggcgtccgccgtcaccgccgacctcgcttcctacctccacaagctccaaccgcgcctcctcaagttacttcgcagcaatgccttcaaggccaagcccgcgctcatcaccctcatcggcgcctccgcggccatggccggcgatgccgaagtcaccgcctccatcccgtgcctccgcgatgcaatcgctagcgatgactgggcagcgagaaaggcggcggcggaggcgcttgctgcattggccctggagcacacggatcttctcacgacctacaaatcctcttgcgttaccttcttcgaggccagaaggtttgacaaggtcaagattgtgcgagagtcgatgaaccggatgattgaggcgtggaaggagatcccgggtgctgaagaggacgagtgctcctccgctccgccaccagcgtcccaatcacaacgaagatcttctcttacagggagtgcaagtgatgggcgatatccagctgcttcgctgggctcaaactctgttccatcatcaacaaggaggagcagattacctgtgagcagatcatctccgcctgatgtgtcacccagtgtcaccaaaacaaatagtccttcgtccatcaggaacaagaagctgtcaccaccttcatatcgcaaagtgcgccaagcaaataattgtgactacaaggttgagattgctgttgctccggatgctaccccaatcaaagtggtgactgaggagaagctactgaaaggaggcaatgtgagagacagactggaggctaggagaacactcttccaaggcagcgaggataggtcagccaagctggctggacacaaagcagggtcacgagttgttccgtacgagggcggtggtaatttggaagagatttcagaagttgaaggtggatcagaaaggtatacagttcataaggatgagagcttgtcagaaataaggacgcagctccttcagattgaaaatcagcaaagcagtttactggatcttctccagaaatttatgggtaagtccgagaatggtatgaattctttggagacaagggtgcatgggctggagatggctttggatgagatctctcgtgatttggccttctcttcaggaaggatgtcaaacagggagcctgatgtaaagacgtgctgcattctgagtccaaaattctggagaaggcacaatggtggtaggtcttcctcaaggttttctgcctcagacccagcaaacagctcagacgagagcagaacttcttacaaatgggagagacagaagtttgggcttcagggtggctttgtcacaaacccattagccgagccaaacatttcttcagtagggaaaacaatggttactcaagaaggcaggaagaaggatacaactttacaaaagtcaaggatgggttaggcatgatgaagacattctgttccaagtgtgagctggtcgagtttgcttattatcatggaggctgctgtagttctcttctccaccgcaaccttttttcctaaggaatgggcgctgttattttcggaagcttttccccccatcagcgctgaaagcatggtgtgcgcgtgaactatggctctatgggagtcactctaaagctagctgtttgagtactatgctacgctgctcccgggagctgcattcacatcttgaggtgggtcgccagggaggcttcttgatcagacagcctcgcttgacaccgacgcaatcacgcaaggcctcccctggacagtcctggactacgctgggtttgacatgagaacgaccactgtgtttgtcatatcgtaactagaggaacatctagctttatggtagaacgtaatcacaatgtatcaccattcctacggaattatggatgcgtcttgtaaataggccggataaagcgcttctatgttcgcgagcttcttttgtttaccatgattccaaagtgcgccttttcttttctcgc

SEQ ID NO: 602 - DNA, 1744 bp, Zea mays
ccttccctcgctgaagccctctcgcgcctcctcccactcccactggacagagaggaggttagtggaaggcgggctaggaggctacgccgccacagacgcgaagcgatagcgtcggggggaagcaaggaagcgggtggcaatggcgaccggcggcggcggtgggagcgacgacttccacgggctcacgttcggccagaagatctacttcgagcaggacgcgggcgccgccggggggagcgcgacgggcggcaggaaggggaagggcgccgcggcgtccgcgagcgccgcccagccgccgcggtgccgggtggacgggtgcggcgtggatctgagcgccgtcaagcagtactactgccggcacaaggtgtgctacatgcactccaaggagccgcgcgtcttcgtcgccggcatcgagcagcgcttctgccagcagtgcagcaggttccaccagttacctgaatttgaccaagggaaacgaagctgccgccgccgcctcattggtcacaacgagcgccggaggaagccaccacctggaccactcacctcacgatacggcccgcttgctgcatcactagttcaaggtatcaagtgccacatcatcttgttatgtagctacaggtgtagacacgcgttacatactttactcgttattttcagatgcatatgccaatccgctgtttcccgaatctactgttttttttttggtcagagcctggtaggttcaggagcttcctgctcgacttctcgtacccgagggttccaagcagcgtgagagatgatgcgtggcaatggcaagggatgcagcatggcggcgacaggatgctgctgggtaccgccagcgccatccagtggcatgggaaccaagaacctcacccaccacatcgcagcgcagctgcgggctatggcaaccatgcgtacaacaactgccatggtggcggcggcttggtagcagcagcagcgggggcgtcaatgctctcctctgccttcgagcccccgcctggcggtggcggatgtgtcgcaggagctaccgcggccgactccagctgtgctctctctcttctgtcaactcagccatgggatacgcccacccaaagtggcagcagccaccacaaccggtccccagcgatgtccgcggctgcaggcgccttcgaagtggcgccgtcgtccgtcgtggcgagcagctacacggcgtcgagctcctggtctggctcacgggaccctgccgacggcgccaggaaaaacgcgcagcgtcacgatgatggcctgcacctggtccatccaccaggccccgtccaccacggccacttctccggcgagctcgagctcgccctgcagggaagcggcccgccgcatgtcgaccatggcggcggcacctgcttcagccattctgacaccaacgcgatgaattggtccctgtagggacaacaacttttgccgccactgccttgatccggtcggcacgccacgagacatggagcacttgggattgggacaccctggttttgtgcccctgaccttgccgttctggtttttcagggtggaactaactgggattccctaggcgtagatcatgaatcccctttccccgtgtaacccattgcgtccatgaagtcggcccaacaccggatcatatataattctacaactcccataacctaaatcattcttcagttgtgaagatatatgcttgtcaagtgacctggttttattttatctgccatcaattcatcatcatcacttcttt

SEQ ID NO: 603 - DNA, 2547 bp, Zea mays
gtgaccaccgccctctagctcgtcgcctcgtcggcgtgcccagcttctggtccagcgcgtcgcctccgctgctgctgggcccgacgcccaactaccgtgccgaggtcccaggcaggaagcatcttggcgtacgtgccgccggcgacaagcacccaccacaccagtcaaatgaatagttgatttcatttcaagcaattcctgaacaactatattacagtcatgaagtcgttagccaagcaagagacacagccaaaatcgcggctcattgtgcgccttggtgtattccttgcatctcaccacattctgttcagtgttatatgctgctatgcaggcattatcgcgctactactccttccttcacttgcaaaaaacacatacctctcggagaatgctcttatacctggctctgcaaatccattattttctactgaagatgccattgaagcaaacagatttatgaaagcaattgaagctgtggctagagactcaagcagtgtaataggcatggcaaatttcatagcacaacaaatagaagatctaggtgcagaagtgtgttaccaaaagtttctccctcatggcaagaattttcaccctctgaagttcttcacctccatgacaaatgatattgcaattcaacctaatggcactgccaccaattttgggataaatactatcggcattttacgagctcctcgtggcgatggaaaagaagcaatagtgctggttactccttataattctcaaagagttcagtcgaatgaattattatcgctggctcttggtttctctgtcttctctctcttaagtcgagcagcatggctgtccaaggatgttgtgtggttatctgcagactcacagtttggagagtatgctgcagtctctgcatggctaaaccagtatcataatcccgtgtttttgagtcactcagtggtgtcacataccaagatgtacggtgcaaacaatatatatgatggtaattcagaaaaaacagaagccacggctttcaaacgtgctggaacaatggctgctgctctcatatttaaagttggggaaaccagaagatacagtgacagggatagtgttacgatttatgcagaggcatctaatggacaaatgccaaacttggaccttctgaatgtggtgcactatttggctgttcacagacaaggttttcgtgtgaacatcgctgcatttagttctttgttgagctctgcatggctcagggttattgctgaaattttgcatactattggtagtgtgttaagaaaaataaatcctgactggaagcttgatattgcagtccctgattatgtggaagggactgcaaatctagctaactctatgtacaaccaggctcttggagtgcccacagggtcccatggtgctttccgtgattatcaagttgatgcggtttctttagaattttcaccaacatttcatgtcaaaaatgagaatgctaaatctttgtttcttctgaagggtggaaggttaattgaaggagtggcacgttctgtgaacaatctgcttgagaagttccatcagtcctttttcctgtacttccttacaggtccaagcaagttcatttcggttggtgtgtatatgattccgtttgcattgcttttggcacctctcccaatagttgctgctgcccttgctgatggcagtagaagcatggaaaaaacagcggataagttgataggcgacggtaaaacagatggcattgctgatatttcgcagaacaagggtggatcatggaaatggcttcgagctgcaaaagtattgcttgttgtccaattatgggcagtacttgtttcactacttccatattacattactcagatacctgatgccacacctacgcaaagcacactcatttgggttgtgctctccatcgtcgtactgatctccctatctgtcttgtttggctcaccatactcaactggtgttgaatggaaacttctgaaggctaccatgatcacttccatctccatcggattggggcttatgtcgataataaatttcgccactgctcagcttggtgctctgatagtgatcccaatgtgtttgttttctcggcctctgaaggcatcagggatgaatttccttcctcgggcagttttgttggcttcaaatgtagcttttgctgtgttgggttttcctccagttgcgttgctgattatgaaaggagtgtccaagggatcgaggtcgtggacaatagatgttggagatttctgggtatggatggagttcctgtgggaaaggagcagcgcgacgtatctttacctatttcttgtacatcttccctgctggcttttgtgcgtccttgtgttcctgcacccatgtcaccaatcagaatataagctgaagcaggaatagctgtttggcatccatagtcttgtctttttggatggtaaatcttgtagactagtgtagaaatttctcactttcacaaacttttggttacccataattcggaaattattcacccagttggagacgacttgtagacgatgtatcctgcctaatgtactgtctgcaacattttcg

SEQ ID NO: 604 - DNA, 1476 bp, Sorghum bicolor
atgaagacccggagctcagcgagaggggagccgaggcggctcgggaatgcggctctcctggcgctcatgctctgctccgtcgtcgcgctctccctcatccgggggaggttcgccccaattggtagcaccgcaggagacgccatcaaatccgaggacgacgctgctgcagcggcggtggcggtcagcaaggcggctgctgtcaacgttgacaccggcgacggcgccgacgaggccgccgctgaagctgctgctgaggagaaagacaaggaggaggtccagccgaagccagccgccgacggttcccgcggcggcgcagccaagccggtgtgctacgagacgagccgccgctccgacacctgcgaggcggctggcgacgtgcgcgtgttggggagctcccagacggtgtacgtcgactcgctggaccgggagtggaagaccaagccgtactgccggaagcacgacaacttcgcgctcgcccacgtcaaggagtggtccctcaagccgctcccctccggcgctgcgccgcagtgcacggtgaacagctcggccaccgcgttcgtgctctccacgggcggcttcacgggcaacccgttccacgactacacggacgtgctgatcccggccttcatcacggcgcacccgctccgcggcgaggtccagttcctggtcagcagctacaagtcgtggtggatgaaccgctacatccagatcttccagcagatgagccggcacgaggtggtggacatcgacgccgacgacgaggtccgctgctaccggaacgtggtggtggggccgacgttccaccgtgagctcggcgtggacgcgtccaagtccccgtcgccggggtactccacggccgacttccgcaagatgctgcgcgacgcgttcgggctggagcgcgccacggccacgcccagcggcgaccggtgggacatccggcgccggccgcggctgctcatcatctcgcgccgcccgtcccgcgggcgcgccttcatgaacgagcgcgccatggcggacatggcggcgagcctcgggttcgacgtgcggatcggggagcccgacagcagcaccgacacgtccaagttcgcgcggctggtgaactcggcggacgtgatggtgggcgtccacggcgccgggctcaccaacatggtgttcctgccggccggcgccgtggtggtgcaggtggtgccgtacggccggctggagtggctggcccggaacacgttcgcggagccgtcggcggggatggaggtccactacctggagtacgtggtgcagctggacgagacgacgctgagcgagcagtacccgagcgatcacccggtgctgagggaccccatggccatccacaagcaggggtggaacgcgctcaagaccacgtacctggacaagcagaacgtgcgcccgcacctgggccgcctcaagaacaccttcctacaggcgctcaagatgctgccgcacggccgggacgattga

SEQ ID NO: 605 - DNA, 1348 bp, Zea mays
caaaaccaaactgtaagcgcaccgcccaaaaccctataaaccatctcccatctctctggctcgctcgtctagcagatgcacagcagcaggcgtcccctgtcttcgtccttccgaaatcccaatcctccctccgagtcccccatcccaaaactcggagctccgaagctggcactggcatcgcggcaatgccgaggccgcccacaatggtgatccaggacgactacatcgacatggacctgaccccggcagccacaccggagccctcgccagcctcgccccgcttcgagttccagagcgccggcgccggcgccgccggcgacaggcatagggaggcggcgttcgcgtcccccgcggacgagctgttctacaagggcaacctgctgccgctccacctgccgccgcggctgcagctcgtgcagaggctcctccaggaccaggagcagccgccgccgctgcgaggggcgaagcgggatgcggagtcggatgccacggcggcggcggcggcagagcgaggagacgccgacgctgccgctgccgccagcaaggtgtgcgccgccaagaagccgtcttgggccaagaagctcaaggtggttaagcggtgggcgtcgaaggagtacatccggtcgctcttcctggccaggccgccgttgccgagcgacatcgtcgccgccgccggtggcgccagcgccagcggccacggcatcggcagcgtcagcgcgagggggagcgtcctagagcaggaggaggtgtgccagtgccagcaccgcaagtccttctccggcatcatccgccgggtgcgcctcgtggcgaccaaggcgcctgggacctcgccgctgtgctcctcctcgtcctcgtcctcctcgtcgtccacgccgtcgtgccgcaacgcaaacgggttcttcttccggacgccggcgtcggcggcgggggcgacgccggcgctgaagcggagcagcagcgccgggtcgtccgaggagggcgccatccagggcgccatcgcgcactgcaagcgttcccagctgctgcagcccgggatggtggcctcggcggcggcgcggaggagcgtcagcgacgtcatgttctactcggtgaccaacacgcccagagcctcttccgtgaccgccggcgaggtggcgcaggagaggaggcaggagatgtgcaggggctgatgatggccgatgacatgccacccatggatcaaaagcgacattcttttgtttcttttcttttttgtttattttgcttgtgaagatgatgagcaatgtgatgtgggttgctctggtgatgatcaggacgcaatgtgctgtgactgtttccccggttcccttgattctttgcgatcttctcc

SEQ ID NO: 606 - DNA, 1294 bp, Zea mays
ttttgcttggctccgcacccgcgcccggctcgtcgtcaatccacccatccatctactgcgccgaaggaacgccccgccgctccggcggcgtacgcggggagaggagaggagatgagacgaagtgcgacggggtgggcatgaggtgcaagaagcacccgtaccaggtcggcggcggtggcgtctgtgccacgtgcctccgcgaccgcctgatcgcgctggaggccgcgcagaacggcgacgcgtcgtcgtcgccgccgccgcccgccgcggcgcccgcgttcccgaggtcggtgtccccgtacgtgtcccgcaggaagtcggacacgtcgggcgggggcggcgcgctcaggcaccacccgagcctgctcttcttccggacgccgcaggtagggcccgcctacggcggcggcgcgttggaggaaggcgacataggctacgagtacaagaggcggcgcgccggcaagttctccgtgctcgccacgctcttcggccaccaccacggtcacagatcggaagagacgcaccaggaaggcgccacggagcggaagaaacattcttggttcgccgcgatcatgccgcgccgccgcaagaagcaggcggcgccggcctcgatcacctcgccacggtcagccccgccgaggcgctcctgccgcgtggtcagcaaccgggggctgtcgccggagcgggacagccacggcagcggcgacgagagcagctcgcccgccgcggatcccccgtggcggccgtccccgtcccccatgcggaggacccgctgccggcgccgccagacgaacagcatgccgtcgggtttcgccgtctgcctcagcccgctcgtgcggcccagcccggggcgccgccgccacgtccagccgccggacccgggctccttctcctccgagttccggccgtcgccgctccacagtctctcgtctgctgcctccgttacgcgctgtcgctccaggaagctcgccgacgtcggccgcttccggtgatgattgcttccaccttcaccattttcgtccttccattccatgcaccaaatccagattagtccacgttttaaaatttctttttgttttttttttttttttttttttggatttattacattttgtctatccgtgaagaagaagagtatgcaagactggcacacacaccccaaaccaagtccaaaacacccccgttgacatatatactactgcgtagtttagtactgcttgtcggcccaacattttgtggcgatgtaacgagctgcttgtactgcttccaagtaactacatattcatgtttgtac

SEQ ID NO: 607 - DNA, 1389 bp, Zea mays
gctccctagagcctcctcgccgcgtgcccagccgtcgagttcccctgcgcgcggagcttttccctccctgctcgctcctccactgcgcgtgccgctcctttttccccgcgcgtgcaacctcctctgctggtcgtccctggtgctccctgctcgtgccgtgtccctgtttttctttccctctctgctcgtcctccacttagctcatggcgcatgtccctgctcggatctctgccttccgccatggccacgtccaccacttttagctgccgctgtttttcctctggtgctcgcccctgcgttggtcatgcgcctggttgccgagtccctgcttcctgcgccctggcgcccaaccccacgcggcctccctgctcggaccgcgttcttggctccagctcggctctgtcttgtgccggcgtcctctactccatctttttccctagcgcgccctggtattcgctcgctgctgcgcgcgctctcccctgtctgctcgtcgtggacgcgggccgctgcccatgccgagctcccttcagttctccagcgtcgcgagctctccgtggtcgacgctcccagccctctactcaccgagctccgtgcaggtgcgccccatcccgcctgcactcggaccgcgccctcgctgctggtgctcgccgaccgcggttgtcctgcaccctgttgcgctcgtccaggtcgccgctgtcgagtccctgtgtgcgcagccatgtccctctgctcgccgtgctagccgtctacgtcatcgccggacttgtctccccgaccatcgtgatgttgttatttcctgctgcgccgtgacatcgtcaagctccagtgcttagcgtcgaggtcgctgcgctgttgtcgctctaacttccttgttcttgcgcggcgtgtggcggtcgtgttcacatcagcggcatcgatcagcgtccccatccccatcgccgttgaactcccagacatgttcctctctgtttgcttgtcctcggttccggcgcgcgtgattttaaagctctacgcgttcgtcgtgccgcgctatcatcacctcctatcgtaaactcgatccccgttgtcgttgcttcaccgtactcgttggtcgtacgcccttggagctccctgttgagtaaaataaatgaaccggagatcatcgtggtctctcatctaccaagccgattcggttatggtaagccgatttatttttacggttaattagattgtttagttatattgtggcgatgctctggaaagaatacatttctcatttcttttgtgtgttatatgttgccataaggtattgtagaaatatttcccatgcagtagtcatgtcatgtgctattagacttgtatgcaaggcacgattaaattaataatgtaagaagtgggattaacattttt

SEQ ID NO: 608 - DNA, 1169 bp, Zea mays
gtggtagtccgggctcctcctgagagaataatagttctgttttgaatttgaaatttgtttgatcaggtttcacttgctcgcggagtttgacgaggccaagcgcagctgtagaaagaggctcgatgggcacaaccggcgtcgcaggaagccgcagccagataccatgagctctgggagctttatgacgagtcaacaagggacgaggttctcgtcgttcccggttccaaggccggagccgagctggcccggagtcatcaaatccgaggacagcggctcatactacgcgcaccagcgccacccggtcctaagcagcaggccgcacttcgccggcgggggctccacgccgccggcctactcgtccaaggaaggccggcgcttcccgttcctccaggacggctgcgaccagcagcaggtcggcggcttcagcgcgggcgcgggggcgcagcagctcgaggtctcttccacgtccacggtgtgccagcccctcctcaaggccgccgccgccgccgccccaccgccgccgccagagagcagcagcagcaacaagatgttctccgacgggctcgcccccgccgtgctcgactcggattgtgctctctctcttctgtcatcccccgccaactcctccagcgtcgacgtgggccggatggtcgtccaccagcccgcggagcacatccccatggcgcagcccctcgtccccggcggcctccagcagcagcagcagcaccacccgttcggcggctcccccgcctggttcgcctgctcccaggccggctccagcgccgtctccgccggcggtttcgcctgccccccgggcgtggagagcgagcagctcaacaccgtgctggtgccgagctccgacggtggcggccacgacatgaacatgaactaccacggcatattccacgtcggcggcgacggctcctccgacgggacgtccccttcgctcccgttctcgtggcagtagctagctttccaattcaagcgtccagcagtctatcgtttcagctgtactagtggtcgttttatttatttattcgctgctccctcgctccgttttaacttgtcctgtcgtttgctcgtttcttcgttttgcatgcctgatgcatatgcggcctggaaaaaaactcgcataaaattactgagaccgtccgtgtgtctggttctgg

SEQ ID NO: 609 - DNA, 1851 bp, Zea mays
gacaaataggcggtcccagtatttgttgagagcaaacaaaattcgagaaaaaaagccacgaagagttcacaaggtctccggtagtagaatgcaaagtagtagatcgctgccttattagtattctgtactgtaagtcagaaagagtttagtgtgtttctgaatcgagtacagattaaacatgatgaaaggggtttttcccccattgtgagcagctgatgcttctcatgtactagcagggaattgccttctattatcctttagccgtgcacatcacatgcgcacatagaaaattctagtccctgacctgcagtagagggcgtctgacctgcagtagaggccgtctcagaaagacagaaaatgttcaggcaaaatttcatatagtccctctattctaaaattatgagatgtatttttactaaaaatatatagtttatacataaatctgtagaaaataatatgtatctagaaaagctaaaacattttatgatctaaaatagtttattaaatcataagcttgttccacttacttacatatgcatgttactttatactcatacacttttatactagtatgtaatcggcagacttgcactctctgtaagactgtaacggaagattaactgcatggtaggagtagttactggagtactctcacagagtgtagagtagagtacagtagcagcattactgcaatgagccggtgcacgtgaactcgcattactccaatgagatttgtagcgagaaatccggggctcatggatgggtattgggtagggcctgcagcatgatctgctccagaacgccatgccgggacctttattctcactttcactttggccgctgcctttaccactcagcgtctggactcgagacgctccttttctttccactcatctctttttttttcacctagaaagcatcgcagtcacagagcctccattaccccccctcgggactgcaccgagtcatctgcttttgctactaatctgaccgtgagctttacgaccgtgaaggacgacagagatgtcgagcccatttcatctgccttgttttactacggagcatgttgctgcggcctggacatggacgcaccatgtcaccgtgcgtggtcacatgaggattcagagttcccgagaaagcagcttgtgatagcagtgacatcacgccgattccgcgtgcgccaactgttccgagagcgatggcacgaggaccgccattgccatggccggtggccccgtcctctctcggagtcttgtgtcctttacctccgcaggaatctctgtcctttcgcgatgtaaaaaattaccgtcgctgttaatttgtttactgactccctgtactgggtttcctgggctgcagctgggtgggaggagcaacgccacgtcgtcggcgaaggcgaagcaggagcaccgcgaggactgccacctcatgggcctgacatggctgctgaaccggaaccccacgcggtaccgcgaggcggccacggcggtcatccaggcgctcatggcggccgacgaggccggcgcgggccacccggccacctgctcgctccccgccgacgatgagctaccagtggccgttgcctcctcgcagattaacggcgccacgtccgcatcgatgtcctccgcccatggcagtctgcttctggtggtcctcgctgctgccgtcattgtcttgtcctgctgatcctaatagaatgcttccaaatcgatgtgtcgcatcgcatggtctctttattactactagtacgtacctttttttctttgttcggtctagttgagacaagatttagaattaagacgctggttttgggtggacctcgttaatgatgtaattatatatttgttcctt

SEQ ID NO: 610 - DNA, 1836 bp, Zea mays
gcattgcattgcagtgtagcaggcatctccgtgggcaattgctggctggcctagctagctagaagtatctcatatccgggtataggagtatctctctcgctttctctagccatgacgctggtgaggatgccttgccgcctctgctgcttcctgctcgtcgtcgccgcctccgccgtctccgggcgggggcgggtggtcaccaccctcccgggctacgagggccgcctccccttccacctcgaaacagggtatgtggaggtggacgaggacgccggcgcggagctcttctactacttcgtccgggccgagtccggcgccgacgacagcgacaccccgttcgtcctccggatccccggcggccaacgctgctccgccttcagcggcctcgcctacgagataggtcccatcatgttcgtcgtggagccctacaacggcagcttgccgcgcctgcgctacaacccaaactcgtggacaaaggtggcgcatattctttttgtggattcgccagttggggccgggttttccttctccagagatgccaaaggctacaacgctggagcggtatcaaccacgctgcacttggcgaagttcctcaacaagtggttcaacgaccatcctgagtaccatgcaaatcctttctacatcgatggagaatcatacgctggaaaaattgtaccattccttgcacagatgatttcagaaggtattggagcaggaatgaagtcggcacctcgtctcaagggctatctagtgggcaacccgtccacagaggagcgtattgatgttagcgctagagtgccttgtgctcacgggtttgggattatatcacatcagttgtatgagatgatattggggcattgccatggagaggactactccaatcctgcaaaagagttgtgtggtcaggcactgaagaccttcaatgatctcacctcggaagttgcgcaaggccatgtactgcaggagaaatgcgtcgcggcgtcgtcgtctcctgtgctgaacgcaaacagcagggtggccggcggctcgtcgtcgtgggcctcagatggcaggaagatcctacgggaggaagaaatggtgggacgacgcggagtactgggcaagctatttcatccaccggctcttcctccattcagttgcagagtttaccggtactacctgtcgtatttctgggcaaacgacaggcgcacccgggatgctcttgggatcaaggagggcaccgtggatgagtgggtcagatgccacaacgacgaccaagagttgccttacgagagcgagctgaagagtgtcgtcaagtaccaccggaacctgacgtccagaggctaccgagccatggtatacagcggcgaccatgacctgctggtgccacatctgggcacccaggcctgggtcaggtcgctcaacttccccgtcgtggacgactggagggcgtggcatctcggtggccagtcagctggatttacaataacttactcaaacaacatgacattcgcgacgatcaagggcgccgggcatacagcacctgagtacgagccggagaggtgtttcgccatgttcagccgttggatcctcaaccggccactctaatccatcggtgaatgaagagattcgtgtgtaaatctttcttcacgaaactactggctataagatgtacgtggatggaataaaatgctggctatgaacccttgatgctgatgatatatactccatcagtgtggtgaagccagatatgtattgtaggaataaataaaagtacaaaacggatgtacaaaggtacgtacagtgccctctagctacgctacattagcaatatacacgttcatatacataattttc

SEQ ID NO: 611 - DNA, 1849 bp, Zea mays
atctccgtgggcaattgctggctggcctagctagctagaagtatctcatatccgggtataggagtatctctctcgctttctctagccatgacgctggtgaggatgccttgccgcctctgctgcttcctgctcgtcgtcgccgcctccgccgtctccgggcgggggcgggtggtcaccaccctcccgggctacgagggccgcctccccttccacctcgaaacagggtatgtggaggtggacgaggacgccggcgcggagctcttctactacttcgtccgggccgagtccggcgccgacgacagcgacaccccgttcgtcctccggatccccggcggccaacgctgctccgccttcagcggcctcgcctacgagataggtcccatcatgtttgtcgtggagccctacaacggcagcttgccgcgcctgcgctacaacccaaactcgtggacaaaggtggcgcatattctttttgtggattcaccagttggggccgggttttccttctccagagatgccaaaggttacaacgctggagcggtatcaaccacgatgcacttggcgaagttcctcaccaagtggttcaatgaccatcccgagtaccatgcaaatcctttctacatcgatggagaatcatacgctggaaaaattgtaccattccttgcacagatgatttcagaaggtattgaagcaggaatgaagtcggcacctcgtctcaagggctatctagtgggcaacccgtccacagaggagcgtattgatgttagcgctagagtgccttgtgctcacgggtttgggattatatcacatcagttgtatgagatgatattggggcattgccatggagaggactactccaatcctgcaaaagagttgtgtggtcaggcactgaagaccttcaataatctcacctccgaagttgcgcaaggccatgtactgcaggagaaatgcgtcgcggcgtcgtcgtctcctgtgccgaacgcaaacagcagggtggccggcggctcgtcgtcgtgggcctcagatggcaggaagatcctacgggaggaagaaatggtgggacgacgcggagtagtactgggcaagctatttcatccaccggctcttcctccattcagttgcagggtttaccggtactacctgtcgtatttctgggcaaacgacaggcgcacccgggatgctcttgggatcaaggagggcaccgtggatgagtgggtcagatgccacaacgacgaccaagagttgccttacgagagcgagctgaagagtgtcgtcaagtaccaccggaacctgacgtccagaggctaccgcgccctggtatacagcggcgaccatgacctgctggtgccacatctgggcacccaggcctgggtcaggtcgctcaacttccccgtcgtggacgactggagggcgtggcatctcggtggccagtcagctggatttacgacaacttactcaaacaacatgacattcgcgacgatcaagggcgccgggcatacggcgcctgagtacgagccggagaggtgtttcgccatgttcagccgttggatcctcaaccggccactctaatccatatgtgccttctcgcatcgaagatccatcagtgaatgaagagattcgtgtgtaaatctttcttcacgaaactactggctataagatgtacgtggatggaataaaatgctggctatgaacccttgatgctgatgatatatatatactccatcagtggtgaagccagatatgtattgtaggaataaataaaagtacaaaacggatgtacaaaggtacgtacagtgccctctagctacgctacattagcaatatacacgttcatacaaaaaaaaaaaaaaaa

SEQ ID NO: 612 - DNA, 2127 bp, Zea mays
cttgagaggaaagccaccagcagcaagcgaagaccaccagcagcagcgcagcggcgacgtgtttcgctctcgccatggcgtcgtcgtcctcgtcccggctgctgctcctcctcctcccgtgcctcgcgctcacgctgctcggcgcggcagacgccgaagtgcaccaccacgagttcgttatccaagagacgccggtgaagaggctgtgcaagacgcacaacatcatcacggtgaacgggcagtacccggggccgacgctggaggtcagggagggtgacacgctcgtcatcaacgtcgtcaaccgggcgcagtacaacgccaccatccactggtacgtacgtcgttgaagctcgtttttctcaaccgtgagtgacatgacatgacatgacatcgatcgtctggtctgtctatactctctcccgttcatggccggctgtctcgatcaatgcgcgctgcatgcatggcgtgtgcaggcacggcatccgccagataaggactgggtgggcggacgggccggagttcgtgacgcagtgccccatcaggcccggcggcagctacaagtaccggttcaccatccaggggcaggagggcacgctgtggtggcacgcgcacagctcctggctcagggccaccgtctacggcgcgctcatcatccgccccagggagaacaagacctacccattcgccaagccctcgcgagaagtccccgtcatcctcggtgagtggtgggatgcgaacccgatcgacgtcatccgggaggcgcagaggaccggcggcggtcccaacgtctccgacgcgttcaccatcaacggccagcccggcgacctgtacaaatgctccaacaaagagactacggccatcccggtgaaggccggcgagacggcgctgctgcggttcatcaacgccgcgctcaaccacgagctgttcgtcaccatcgcgcagcacaagatgacggtcgtcgccaccgacgcgtcctacaccaagcccttcaccacctcggtgctcatgctcgcgccgggccagaccaccgacgtcctcgtcaccatggaccagccgcccacccgctactacgtcgccgcgcgcgcctacgtctccggccagaacgtggccttcgacaacaccaccaccacggccgtcctcgagtacgactgcggctgcgcctccgacttcggccccaagatacagccggcgttcccggcggcgctaccggccttcaacgacacgtccgccgccaccgccttcgccgccgggatcaggagccccgaccgggtcaaggtccacgagaacgtcgacgagtacctcttcttcaccgtcggcctcggcctcttcaactgcaagccgggccagctctgcgccgggcccaacaacaacacccgcttcgcggccagcatgaacaacgtctccttcgtcttcccgcagaccgactccctcctccacgcgcactactacaagatccccggcgtcttcaccaccgacttcccggcatacccgcccgtgcagttcgactacacggggcagaacgtcagccaggccctgtggcagccggtccccgccaccaagctgtacccgctcaggttcggctccgtggtgcagctcgtcctgcaggacaccagcatcgtcacgcccgagaaccaccccatccacatccacggctacgatttcttcatcctcgccgagggcttcggcaacttcgaccccaagaaggacgtcgagaagttcaactacgtcgacccgccccagaggaacaccgtggcggtgcctgtcaacggttgggcggtcatccagttcgtcgccgacaaccctggtgtgtggctcatgcattgccatctggacgtgcacatcacctggggcctggcaatggctttcctagtggaggacggctatggcgaactgcagtcgctggagccgcccccagttgatcttcccatgtgctagtggaggacggatatttgtgttgaggaagaaagcctggtcacgttgtatgttaattgttactcttttttggtggaggggggcgtgttcgtgatcttaaattcttaggggacttaattttccagcttgttggtttgaagtttcttctgtaaatctatgtaattttcaatgacattcagcatattatttgagaat

SEQ ID NO: 613 - DNA, 1798 bp, Sorghum bicolor
atggtggcgtcggccaagggacggctcgtgtccgtgctcgcggtggcggcggcgctcgcggccgtgctcctctaccgcgcccccttctccaagagcttgggcggcgaagggtgcagcctcctcccgcacgaccacttctgggtcgccagcgaccgcgtcgtcacgctcggccgcgtcggccccgccgcagtggaggtcaaaggagggctcatcaacgccatcgcggtcggggactaccggagcttcgtgctccgccgtcctctcctggactacggggacgccgtcatcatgcccggcctcatcgacgtgcatgcccatctcgacgagcctggacgtgccgagtgggagggcttctctactggtacaagagcagctgcggcaggcgggataacgacgttggtggatatgccactcaacagcttcccgtcgacagtctctgaagaaactctcaaactgaagctggaagcagctcaagataagctatatgttgatgttgggttctggggaggacttgtgccagagaacgccttcaacccaagtgctttggagggcctcctaaatgcaggcgttttaggactcaagtcttttatgtgcccctcaggcatcaacgacttccccatgacaaattcaactcatattgaggaaggattggttacactggcaaaatacaagagacctttacttatccatgcagaacgtatacctgaggctgaggatgatgatatgcgagaggatgaactagatcctcgatcctatatgacgtatctaaagtctagaccaccatcatgggaggaatcagctatcagagatctacaccgtgcaatgaaggatacggagtcggggggtcggtccgaaggagctcatattcacattgttcatctatcagatgcaaaaacttccttggaacttatgaaggatgctaaacgcagtggtgcaagtttatcaatagaaacatgccctcattacctggcattttcatctgaagaagttccagatggcgatactcgctttaaatgttctcctcccatacgtgatgacacaaacagagaaaatctttggaaagctctacttgatggacacatagacatgctaagttcagaccactcaccatcaactcctgatctcaaactaatggaggaaggcaactttttaagggcatggggaggcatatcatcattgcagtttgtcctcccggtaacatggtcatatgggcgaaagtacggcattactctgaatcagctatcctcatggtggagcgaaaatccagccaagcttgcaggccaaaagaacaagggagctattctaccaggataccatgctgacatagtagtatggaaacccgaaactgagttccaactcgatgacagccatgttatatatcataaacatcagaatatttcggcgtatctaggaaagcaactttctggtaaggtcctgtcaacttttgtgagaggaaaccttgtgtttgctgaagacaagcatgcaaatgttgcttgtggtgttcctatcctcgctaagtaacatgcaggtggatccagagctgccattgttgatgatccgtagtgtatacaatcgtatgcaccatgtcaatttgttggttgctcttgtatattttttaaacaaactgcagaagctctgcccctcaattaagagaggagtaaaagagttttatgtacaggttatagatgaactgcaagggaaaacagagaaggccaacaagagtggcaaatattagcagaaacccgggtagaacacattaaatgtcattgttgtgtagtagcagtctaaaggtattggc

SEQ ID NO: 614 - DNA, 1834 bp, Sorghum bicolor
aaacagcaagaaccaccaaggcgactccgatctaaatcaagcgagtcctcccgtttcatcgcctgcgaaaaaggcgagaaatccccaacggaaggagcagcagcgccagtgctactgctagcagcagaagcagcagcgattcgttcctcaatcctcgtacctctcgccgcgctcgcccactcggatcgaaacccctagggtttcgcatcggcctcccgccacttcctatccctccccctcccctccctccgccgcgcgcgcgcggcgagtcaccaaaccctaggacggcaaatccggtgcgatcgcccacggtggaggcctcctcggctgccgagaggagccgctcagggctcgggtcagggttccggtacctcgccggcgccgcctctgggtggtgggaccggtggatggtcatgggagccagcggctccaagcttgagaaggccctcggtgaccagttcccggaaggcgagcgctacttcggcctcgagaacttcggcaacacctgctactgcaacagtgtccttcaggcactctatttttgcattccatttagggagcagttactggaatattatgcaaataacaaaactccaggtgacgctgaagaaaatcttttgacctgtttggccgacctttttatgcagataagccaagcaaagaaaaagactggcgttattgctccaaaacgttttgttcagagagtgaagaaacagaatgagttgtttcgcagctacatgcaccaggatgcacacgagttcttaaatttccttttgaatgaacttgttgatattctggaaaaagagtcaagtgctgccaaggattcaccccaattgtcatctcctgaaaaagctccaaatggcccagttcaacctttagccaatggagttaaaaaagaacctccagttactctggtccataaaaatttccagggcatattgaccaacgaaacaagatgcttaagatgtgaaacagtaactgcaagggatgaaacatttcttgatcttagtgttgacattgaacaaaatagttctatcacaagctgcctgaaaaatttctgttctactgagactttaaatgcagaggataaattcttctgcgacaaatgctgcagtttgcaagaagcacagaagagaatgaagatcaagaaggctccccacatattggtgatccatctaaagcgtttcaagtacattgagcagcttggccggtataagaagctttcataccgggttgtattccccatggaactgaagctcagtaatacatccgacgatgtagacactgagtactccctctttgctgtcgtggtccatgtcggaagtggccccaaccatgggcattatgtaagccttgtcaaaagccacaaccactggttgttcttcgacgacgaaaacgtcgagatggttgaagagcagaccctacaaacattcttcggttcctcacatgaatactcaggaaacacagaccatgggtatatcttattttacgaggggcttggcgggaagagttagatggggtttattcaccttccctgttccttttctcctttttctctttggagcttgcaagttcactcttgtacctacacagctactatttcattacctccatggaatcgaagaggttgtatgaggtgaggacgccagattttgggtggtttcagtgtacaggggataatggaatctagctcccaacgatgaaataaggtgtaatttttaagttcgcctgaccagtttcttctcagggctaacatcttttgttaaagagtgggactttactattggacacactgtacatcaattctagttcataactctgcgcatttaccagt

SEQ ID NO: 615 - DNA, 1304 bp, Zea mays
gcccctcgacggcgcccgcgcccgcccgctgccaggtcgacggctgcaacgttgacctcaccgacgtcaagcccgcctactactgccgccacaaggtgtgcaaaatgcactccaaggagccccgcgtcctcgtcaacggcctcgagcagcgcttctgccagcagtgcagcaggttccaccagctgcctgaattcgaccagctaaagaagagctgccgcaaacgcctcgcaggccacaacgagcgccggaggaggccgccgcctggaccccttgcgtcacgatacggccgtcacgctgcgtcgctcggcgagcccggcaggctcagaagcttcatgctggatttctcgtacccgagggtctcaagcgccatgaggggtgggtttccggcggtgaggcccggtggtgaaagggtgcctggcggtatccagtggcaagcgggcttggatcctcgtcaccaccaaggcgcggtcgcgggatacggcgcccactatgggagcgagggtggtagctcgtcgtcggcgaggccgccggtgttccctggcccggagctgcccccaggtggatgccttgcaggagtccccgcggactccagctgtgctctctctcttctgtcaactcagccatgggatgctgcccacagccacagccacagccacgctgcgccaacagcgggtttcgacggcggcagccctgtggcgccctccctcatggcggcgagtagctacatcgcgccgagcccctggaccgagaccgactcctggggccacgaaggcgggcggagcgtgcctcagctgccacctgacgacgtccccctcggcgaggtgcactccggctcgagcagccaccacggccagttctcaggtgagctcgagctcgccctgcagggaaacaggccagcgccagggtcggcggcaccgccagcgccgcgcaataatcagggctccgcgggcacgttcgaccaggctggcaacacgatggactggtcgctctaggccgggggccgaaataaagcgcagcagatcctagccgcgcagggagatggaggaggctgaaagtctgatgctgcacgctgcttgcttagcttagagcatccagcatgataagagtgatgaactgatgcggtgtcaggagactagtttattctgtgcttcaccatgaactcgtctgtcgcggcgtctatgtagacagacgtcacggcagacgtccgtggtttgaagttaccagtatgcttgtcgtggactttgctcgcgatgcattaatctcattgttcaccatccagaaaaaaaaaaaaaaaaaaaaaaaaa

SEQ ID NO: 616 - DNA, 2154 bp, Artificial sequence
  miRNA-Resistant target example
atgaagtcgttagccaagcaagagacacagccaaaatcgcggctcattgtgcgccttggtgtattccttgcatctcaccacattctgttcagtgttatatgctgctatgcaggcattatcgcgctactactccttccttcacttgcaaaaaacacatacctctcggagaatgctcttatacctggctctgcaaatccattattttctactgaagatgccattgaagcaaacagatttatgaaagcaattgaagctgtggctagagactcaagcagtgtaataggcatggcaaatttcatagcacaacaaatagaagatctaggtgcagaagtgtgttaccaaaagtttctccctcatggcaagaattttcaccctctgaagttcttcacctccatgacaaatgatattgcaattcaacctaatggcactgccaccaattttgggataaatactatcggcattttacgagctcctcgtggcgatggaaaagaagcaatagtgctggttactccttataattctcaaagagttcagtcgaatgaattattatcgctggctcttggttttagcgtatttagcttactctcacgagcagcatggctgtccaaggatgttgtgtggttatctgcagactcacagtttggagagtatgctgcagtctctgcatggctaaaccagtatcataatcccgtgtttttgagtcactcagtggtgtcacataccaagatgtacggtgcaaacaatatatatgatggtaattcagaaaaaacagaagccacggctttcaaacgtgctggaacaatggctgctgctctcatatttaaagttggggaaaccagaagatacagtgacagggatagtgttacgatttatgcagaggcatctaatggacaaatgccaaacttggaccttctgaatgtggtgcactatttggctgttcacagacaaggttttcgtgtgaacatcgctgcatttagttctttgttgagctctgcatggctcagggttattgctgaaattttgcatactattggtagtgtgttaagaaaaataaatcctgactggaagcttgatattgcagtccctgattatgtggaagggactgcaaatctagctaactctatgtacaaccaggctcttggagtgcccacagggtcccatggtgctttccgtgattatcaagttgatgcggtttctttagaattttcaccaacatttcatgtcaaaaatgagaatgctaaatctttgtttcttctgaagggtggaaggttaattgaaggagtggcacgttctgtgaacaatctgcttgagaagttccatcagtcctttttcctgtacttccttacaggtccaagcaagttcatttcggttggtgtgtatatgattccgtttgcattgcttttggcacctctcccaatagttgctgctgcccttgctgatggcagtagaagcatggaaaaaacagcggataagttgataggcgacggtaaaacagatggcattgctgatatttcgcagaacaagggtggatcatggaaatggcttcgagctgcaaaagtattgcttgttgtccaattatgggcagtacttgtttcactacttccatattacattactcagatacctgatgccacacctacgcaaagcacactcatttgggttgtgctctccatcgtcgtactgatctccctatctgtcttgtttggctcaccatactcaactggtgttgaatggaaacttctgaaggctaccatgatcacttccatctccatcggattggggcttatgtcgataataaatttcgccactgctcagcttggtgctctgatagtgatcccaatgtgtttgttttctcggcctctgaaggcatcagggatgaatttccttcctcgggcagttttgttggcttcaaatgtagcttttgctgtgttgggttttcctccagttgcgttgctgattatgaaaggagtgtccaagggatcgaggtcgtggacaatagatgttggagatttctgggtatggatggagttcctgtgggaaaggagcagcgcgacgtatctttacctatttcttgtacatcttccctgctggcttttgtgcgtccttgtgttcctgcacccatgtcaccaatcagaatataagctgaagcaggaa

SEQ ID NO: 617 - DNA, 2154 bp, Artificial sequence
  miRNA-Resistant target example
atgaagtcgttagccaagcaagagacacagccaaaatcgcggctcattgtgcgccttggtgtattccttgcatctcaccacattctgttcagtgttatatgctgctatgcaggcattatcgcgctactactccttccttcacttgcaaaaaacacatacctctcggagaatgctcttatacctggctctgcaaatccattattttctactgaagatgccattgaagcaaacagatttatgaaagcaattgaagctgtggctagagactcaagcagtgtaataggcatggcaaatttcatagcacaacaaatagaagatctaggtgcagaagtgtgttaccaaaagtttctccctcatggcaagaattttcaccctctgaagttcttcacctccatgacaaatgatattgcaattcaacctaatggcactgccaccaattttgggataaatactatcggcattttacgagctcctcgtggcgatggaaaagaagcaatagtgctggttactccttataattctcaaagagttcagtcgaatgaattattatcgctggctcttggtttcagcgtattcagcttactctcacgagcagcatggctgtccaaggatgttgtgtggttatctgcagactcacagtttggagagtatgctgcagtctctgcatggctaaaccagtatcataatcccgtgtttttgagtcactcagtggtgtcacataccaagatgtacggtgcaaacaatatatatgatggtaattcagaaaaaacagaagccacggctttcaaacgtgctggaacaatggctgctgctctcatatttaaagttggggaaaccagaagatacagtgacagggatagtgttacgatttatgcagaggcatctaatggacaaatgccaaacttggaccttctgaatgtggtgcactatttggctgttcacagacaaggttttcgtgtgaacatcgctgcatttagttctttgttgagctctgcatggctcagggttattgctgaaattttgcatactattggtagtgtgttaagaaaaataaatcctgactggaagcttgatattgcagtccctgattatgtggaagggactgcaaatctagctaactctatgtacaaccaggctcttggagtgcccacagggtcccatggtgctttccgtgattatcaagttgatgcggtttctttagaattttcaccaacatttcatgtcaaaaatgagaatgctaaatctttgtttcttctgaagggtggaaggttaattgaaggagtggcacgttctgtgaacaatctgcttgagaagttccatcagtcctttttcctgtacttccttacaggtccaagcaagttcatttcggttggtgtgtatatgattccgtttgcattgcttttggcacctctcccaatagttgctgctgcccttgctgatggcagtagaagcatggaaaaaacagcggataagttgataggcgacggtaaaacagatggcattgctgatatttcgcagaacaagggtggatcatggaaatggcttcgagctgcaaaagtattgcttgttgtccaattatgggcagtacttgtttcactacttccatattacattactcagatacctgatgccacacctacgcaaagcacactcatttgggttgtgctctccatcgtcgtactgatctccctatctgtcttgtttggctcaccatactcaactggtgttgaatggaaacttctgaaggctaccatgatcacttccatctccatcggattggggcttatgtcgataataaatttcgccactgctcagcttggtgctctgatagtgatcccaatgtgtttgttttctcggcctctgaaggcatcagggatgaatttccttcctcgggcagttttgttggcttcaaatgtagcttttgctgtgttgggttttcctccagttgcgttgctgattatgaaaggagtgtccaagggatcgaggtcgtggacaatagatgttggagatttctgggtatggatggagttcctgtgggaaaggagcagcgcgacgtatctttacctatttcttgtacatcttccctgctggcttttgtgcgtccttgtgttcctgcacccatgtcaccaatcagaatataagctgaagcaggaa

SEQ ID NO: 618 - DNA, 2154 bp, Artificial sequence
  miRNA-Resistant target example
atgaagtcgttagccaagcaagagacacagccaaaatcgcggctcattgtgcgccttggtgtattccttgcatctcaccacattctgttcagtgttatatgctgctatgcaggcattatcgcgctactactccttccttcacttgcaaaaaacacatacctctcggagaatgctcttatacctggctctgcaaatccattattttctactgaagatgccattgaagcaaacagatttatgaaagcaattgaagctgtggctagagactcaagcagtgtaataggcatggcaaatttcatagcacaacaaatagaagatctaggtgcagaagtgtgttaccaaaagtttctccctcatggcaagaattttcaccctctgaagttcttcacctccatgacaaatgatattgcaattcaacctaatggcactgccaccaattttgggataaatactatcggcattttacgagctcctcgtggcgatggaaaagaagcaatagtgctggttactccttataattctcaaagagttcagtcgaatgaattattatcgctggctcttggtttttctgtattttctttactctcacgagcagcatggctgtccaaggatgttgtgtggttatctgcagactcacagtttggagagtatgctgcagtctctgcatggctaaaccagtatcataatcccgtgtttttgagtcactcagtggtgtcacataccaagatgtacggtgcaaacaatatatatgatggtaattcagaaaaaacagaagccacggctttcaaacgtgctggaacaatggctgctgctctcatatttaaagttggggaaaccagaagatacagtgacagggatagtgttacgatttatgcagaggcatctaatggacaaatgccaaacttggaccttctgaatgtggtgcactatttggctgttcacagacaaggttttcgtgtgaacatcgctgcatttagttctttgttgagctctgcatggctcagggttattgctgaaattttgcatactattggtagtgtgttaagaaaaataaatcctgactggaagcttgatattgcagtccctgattatgtggaagggactgcaaatctagctaactctatgtacaaccaggctcttggagtgcccacagggtcccatggtgctttccgtgattatcaagttgatgcggtttctttagaattttcaccaacatttcatgtcaaaaatgagaatgctaaatctttgtttcttctgaagggtggaaggttaattgaaggagtggcacgttctgtgaacaatctgcttgagaagttccatcagtcctttttcctgtacttccttacaggtccaagcaagttcatttcggttggtgtgtatatgattccgtttgcattgcttttggcacctctcccaatagttgctgctgcccttgctgatggcagtagaagcatggaaaaaacagcggataagttgataggcgacggtaaaacagatggcattgctgatatttcgcagaacaagggtggatcatggaaatggcttcgagctgcaaaagtattgcttgttgtccaattatgggcagtacttgtttcactacttccatattacattactcagatacctgatgccacacctacgcaaagcacactcatttgggttgtgctctccatcgtcgtactgatctccctatctgtcttgtttggctcaccatactcaactggtgttgaatggaaacttctgaaggctaccatgatcacttccatctccatcggattggggcttatgtcgataataaatttcgccactgctcagcttggtgctctgatagtgatcccaatgtgtttgttttctcggcctctgaaggcatcagggatgaatttccttcctcgggcagttttgttggcttcaaatgtagcttttgctgtgttgggttttcctccagttgcgttgctgattatgaaaggagtgtccaagggatcgaggtcgtggacaatagatgttggagatttctgggtatggatggagttcctgtgggaaaggagcagcgcgacgtatctttacctatttcttgtacatcttccctgctggcttttgtgcgtccttgtgttcctgcacccatgtcaccaatcagaatataagctgaagcaggaa

SEQ ID NO: 619 - DNA, 2154 bp, Artificial sequence
  miRNA-Resistant target example
atgaagtcgttagccaagcaagagacacagccaaaatcgcggctcattgtgcgccttggtgtattccttgcatctcaccacattctgttcagtgttatatgctgctatgcaggcattatcgcgctactactccttccttcacttgcaaaaaacacatacctctcggagaatgctcttatacctggctctgcaaatccattattttctactgaagatgccattgaagcaaacagatttatgaaagcaattgaagctgtggctagagactcaagcagtgtaataggcatggcaaatttcatagcacaacaaatagaagatctaggtgcagaagtgtgttaccaaaagtttctccctcatggcaagaattttcaccctctgaagttcttcacctccatgacaaatgatattgcaattcaacctaatggcactgccaccaattttgggataaatactatcggcattttacgagctcctcgtggcgatggaaaagaagcaatagtgctggttactccttataattctcaaagagttcagtcgaatgaattattatcgctggctcttggttttagcgtctttagcttactctcacgagcagcatggctgtccaaggatgttgtgtggttatctgcagactcacagtttggagagtatgctgcagtctctgcatggctaaaccagtatcataatcccgtgtttttgagtcactcagtggtgtcacataccaagatgtacggtgcaaacaatatatatgatggtaattcagaaaaaacagaagccacggctttcaaacgtgctggaacaatggctgctgctctcatatttaaagttggggaaaccagaagatacagtgacagggatagtgttacgatttatgcagaggcatctaatggacaaatgccaaacttggaccttctgaatgtggtgcactatttggctgttcacagacaaggttttcgtgtgaacatcgctgcatttagttctttgttgagctctgcatggctcagggttattgctgaaattttgcatactattggtagtgtgttaagaaaaataaatcctgactggaagcttgatattgcagtccctgattatgtggaagggactgcaaatctagctaactctatgtacaaccaggctcttggagtgcccacagggtcccatggtgctttccgtgattatcaagttgatgcggtttctttagaattttcaccaacatttcatgtcaaaaatgagaatgctaaatctttgtttcttctgaagggtggaaggttaattgaaggagtggcacgttctgtgaacaatctgcttgagaagttccatcagtcctttttcctgtacttccttacaggtccaagcaagttcatttcggttggtgtgtatatgattccgtttgcattgcttttggcacctctcccaatagttgctgctgcccttgctgatggcagtagaagcatggaaaaaacagcggataagttgataggcgacggtaaaacagatggcattgctgatatttcgcagaacaagggtggatcatggaaatggcttcgagctgcaaaagtattgcttgttgtccaattatgggcagtacttgtttcactacttccatattacattactcagatacctgatgccacacctacgcaaagcacactcatttgggttgtgctctccatcgtcgtactgatctccctatctgtcttgtttggctcaccatactcaactggtgttgaatggaaacttctgaaggctaccatgatcacttccatctccatcggattggggcttatgtcgataataaatttcgccactgctcagcttggtgctctgatagtgatcccaatgtgtttgttttctcggcctctgaaggcatcagggatgaatttccttcctcgggcagttttgttggcttcaaatgtagcttttgctgtgttgggttttcctccagttgcgttgctgattatgaaaggagtgtccaagggatcgaggtcgtggacaatagatgttggagatttctgggtatggatggagttcctgtgggaaaggagcagcgcgacgtatctttacctatttcttgtacatcttccctgctggcttttgtgcgtccttgtgttcctgcacccatgtcaccaatcagaatataagctgaagcaggaa

SEQ ID NO: 620 - DNA, 2154 bp, Artificial sequence; identical to SEQ ID NO: 617
  miRNA-Resistant target example

SEQ ID NO: 621 - DNA, 2160 bp, Artificial sequence
  miRNA-Resistant target example
atggcgacctctgcgctggactccctcccggcgccgctccggtcgctgcggctcaagacgaagcagcaggagctcctgctccgcgtctcggcgctggcgctcatctacgtgctcgccttcgccgtccgcctcttctccgtcctccgctacgagtccatgatccacgagttcgacccctacttcaactaccgcaccacgctcttcctcaccgagaacggcttcagcgagttctggaactggttcgactccgagagctggtacccgctcggccgcgtcgtcgggggcacgctcttcccgggtctcatggtgaccgccgcactgctccaccgcctcctccgcgcgctctccctcgccgtccacatccgcgaggtctgcgtactcacggcgcccttcttcgccgccaacaccacgctcgtcgcctacgccttcggccgcgagatctgggactccggggcgggattagtagcagcagcattaatagccatcgttcctggctacatctcccgctccgttgcggggtcctacgataacgagggcgtcgccatcttcgccctgctgctcaccttctacctcttcgtgcgcgccgtcaacacggggtcgctcgcctgggcgcttgcctcggcgttcggctacttctacatggtgtcggcgtggggaggctacgtgttcatcatcaatctaatcccactctacgtgcttgtgctgcttgtcactgggaggtattcgcagaggctctacgtggcctacaattgcatgtatgtgcttgggatgttgcttgcgatgcagatccgttttgttggattccagcatgtgcagtccggggagcacatggctgctatgggagtcttcttcctcttgcaggttttcttcttcttggactgggtgaaatacctgctaaatgatgccagactattcaagtcattccttcgaactactcttacatgtgtgattactgttggcaccctggctcttggaattggtactgcatcaggttacatctccccttggacaggacggttttactccctgcttgatcctacctatgcaaaggaccatataccaatcattgcgtctgtttctgagcatcagccaacagcatggtcatctttcatgtttgacttccacatcctccttttcctgttcccagctggcctttatttctgtttcaaacgcctgtcagatgccactatattcattgttatgtatggcctcacgagtatgtactttgctggtgtgatggtccggttaattcttgtggcagcaccagccgtttgtcttattagtgctattgctgcatctgctacaataaagaatctgaccactttgatccgggcaaagagcagaagtccacagactacttctggaaaaacaactggctcaaaggcagctgcaaagggtgcagttgatcaaagtttaccattccaacacaatgcagctattgctcttcttctgggtgccttttacttgctaagtaggtatgccatacactgcacttgggtgacatctgaggcttattcttctccatctatagttttggccgcaaggggtcataatggtggaagagtcatctttgatgattatcgtgaggcatactattggcttcgtcagaacactcctcctgatgctaagattatgtcttggtgggactatggataccaaattacagctatgggtaacagaactgtcattgttgataataatacatggaataacacacacatagctacagttggacgtgctatgtcatcttatgaagatgaagcatatgagatcatgcaatcacttgatgtgaactacgtgcttgttgtatttggaggtgttaccggatattcttcagatgatatcaacaagttcttatggatggtacgcattggtggaggagttttccctgtaatcaaagagccagattaccttgttaatggggagtatcgtattgacaagggggcagcaccaaaaatgctgaactgcctaatgtacaagctttgttactaccgatttggagaacttaccacggaatatggaaagcctccagggtatgatcgtgtaagaggagtggagattggcaacaaagacataaaacttgaatacttggaggaggcatttacaacttcaaactggatagtgcgcatatacaaggtgaaacccccaaagaacaggtcc

SEQ ID NO: 622 - DNA, 2160 bp, Artificial sequence
  miRNA-Resistant target example
atggcgacctctgcgctggactccctcccggcgccgctccggtcgctgcggctcaagacgaagcagcaggagctcctgctccgcgtctcggcgctggcgctcatctacgtgctcgccttcgccgtccgcctcttctccgtcctccgctacgagtccatgatccacgagttcgacccctacttcaactaccgcaccacgctcttcctcaccgagaacggcttcagcgagttctggaactggttcgactccgagagctggtacccgctcggccgcgtcgtcgggggcacgctcttcccgggtctcatggtgaccgccgcactgctccaccgcctcctccgcgcgctctccctcgccgtccacatccgcgaggtctgcgtactcacggcgcccttcttcgccgccaacaccacgctcgtcgcctacgccttcggccgcgagatctgggactccggggcggggttagtagcagcagcattaatagccatcgttcctggctacatctcccgctccgttgcggggtcctacgataacgagggcgtcgccatcttcgccctgctgctcaccttctacctcttcgtgcgcgccgtcaacacggggtcgctcgcctgggcgcttgcctcggcgttcggctacttctacatggtgtcggcgtggggaggctacgtgttcatcatcaatctaatcccactctacgtgcttgtgctgcttgtcactgggaggtattcgcagaggctctacgtggcctacaattgcatgtatgtgcttgggatgttgcttgcgatgcagatccgttttgttggattccagcatgtgcagtccggggagcacatggctgctatgggagtcttcttcctcttgcaggttttcttcttcttggactgggtgaaatacctgctaaatgatgccagactattcaagtcattccttcgaactactcttacatgtgtgattactgttggcaccctggctcttggaattggtactgcatcaggttacatctccccttggacaggacggttttactccctgcttgatcctacctatgcaaaggaccatataccaatcattgcgtctgtttctgagcatcagccaacagcatggtcatctttcatgtttgacttccacatcctccttttcctgttcccagctggcctttatttctgtttcaaacgcctgtcagatgccactatattcattgttatgtatggcctcacgagtatgtactttgctggtgtgatggtccggttaattcttgtggcagcaccagccgtttgtcttattagtgctattgctgcatctgctacaataaagaatctgaccactttgatccgggcaaagagcagaagtccacagactacttctggaaaaacaactggctcaaaggcagctgcaaagggtgcagttgatcaaagtttaccattccaacacaatgcagctattgctcttcttctgggtgccttttacttgctaagtaggtatgccatacactgcacttgggtgacatctgaggcttattcttctccatctatagttttggccgcaaggggtcataatggtggaagagtcatctttgatgattatcgtgaggcatactattggcttcgtcagaacactcctcctgatgctaagattatgtcttggtgggactatggataccaaattacagctatgggtaacagaactgtcattgttgataataatacatggaataacacacacatagctacagttggacgtgctatgtcatcttatgaagatgaagcatatgagatcatgcaatcacttgatgtgaactacgtgcttgttgtatttggaggtgttaccggatattcttcagatgatatcaacaagttcttatggatggtacgcattggtggaggagttttccctgtaatcaaagagccagattaccttgttaatggggagtatcgtattgacaagggggcagcaccaaaaatgctgaactgcctaatgtacaagctttgttactaccgatttggagaacttaccacggaatatggaaagcctccagggtatgatcgtgtaagaggagtggagattggcaacaaagacataaaacttgaatacttggaggaggcatttacaacttcaaactggatagtgcgcatatacaaggtgaaacccccaaagaacaggtcc

SEQ ID NO: 623 - DNA, 2160 bp, Artificial sequence; identical to SEQ ID NO: 622
  miRNA-Resistant target example

SEQ ID NO: 624 - DNA, 2160 bp, Artificial sequence; identical to SEQ ID NO: 622
  miRNA-Resistant target example

SEQ ID NO: 625 - DNA, 2160 bp, Artificial sequence
  miRNA-Resistant target example
atggcgacctctgcgctggactccctcccggcgccgctccggtcgctgcggctcaagacgaagcagcaggagctcctgctccgcgtctcggcgctggcgctcatctacgtgctcgccttcgccgtccgcctcttctccgtcctccgctacgagtccatgatccacgagttcgacccctacttcaactaccgcaccacgctcttcctcaccgagaacggcttcagcgagttctggaactggttcgactccgagagctggtacccgctcggccgcgtcgtcgggggcacgctcttcccgggtctcatggtgaccgccgcactgctccaccgcctcctccgcgcgctctccctcgccgtccacatccgcgaggtctgcgtactcacggcgcccttcttcgccgccaacaccacgctcgtcgcctacgccttcggccgcgagatctgggactccggggcgggactcgtagcagcagcactcatagccatcgttcctggctacatctcccgctccgttgcggggtcctacgataacgagggcgtcgccatcttcgccctgctgctcaccttctacctcttcgtgcgcgccgtcaacacggggtcgctcgcctgggcgcttgcctcggcgttcggctacttctacatggtgtcggcgtggggaggctacgtgttcatcatcaatctaatcccactctacgtgcttgtgctgcttgtcactgggaggtattcgcagaggctctacgtggcctacaattgcatgtatgtgcttgggatgttgcttgcgatgcagatccgttttgttggattccagcatgtgcagtccggggagcacatggctgctatgggagtcttcttcctcttgcaggttttcttcttcttggactgggtgaaatacctgctaaatgatgccagactattcaagtcattccttcgaactactcttacatgtgtgattactgttggcaccctggctcttggaattggtactgcatcaggttacatctccccttggacaggacggttttactccctgcttgatcctacctatgcaaaggaccatataccaatcattgcgtctgtttctgagcatcagccaacagcatggtcatctttcatgtttgacttccacatcctccttttcctgttcccagctggcctttatttctgtttcaaacgcctgtcagatgccactatattcattgttatgtatggcctcacgagtatgtactttgctggtgtgatggtccggttaattcttgtggcagcaccagccgtttgtcttattagtgctattgctgcatctgctacaataaagaatctgaccactttgatccgggcaaagagcagaagtccacagactacttctggaaaaacaactggctcaaaggcagctgcaaagggtgcagttgatcaaagtttaccattccaacacaatgcagctattgctcttcttctgggtgccttttacttgctaagtaggtatgccatacactgcacttgggtgacatctgaggcttattcttctccatctatagttttggccgcaaggggtcataatggtggaagagtcatctttgatgattatcgtgaggcatactattggcttcgtcagaacactcctcctgatgctaagattatgtcttggtgggactatggataccaaattacagctatgggtaacagaactgtcattgttgataataatacatggaataacacacacatagctacagttggacgtgctatgtcatcttatgaagatgaagcatatgagatcatgcaatcacttgatgtgaactacgtgcttgttgtatttggaggtgttaccggatattcttcagatgatatcaacaagttcttatggatggtacgcattggtggaggagttttccctgtaatcaaagagccagattaccttgttaatggggagtatcgtattgacaagggggcagcaccaaaaatgctgaactgcctaatgtacaagctttgttactaccgatttggagaacttaccacggaatatggaaagcctccagggtatgatcgtgtaagaggagtggagattggcaacaaagacataaaacttgaatacttggaggaggcatttacaacttcaaactggatagtgcgcatatacaaggtgaaacccccaaagaacaggtcc

SEQ ID NO: 626 - DNA, 1737 bp, Artificial sequence
  miRNA-Resistant target example
atggctacctcctatctgctgccttgctatgtcctcatcactgtgctcgtgctcttcttctccgtcgacgttacggaaggggccatcagggagtaccagttcgatgtgcaaatgacgaatgtgacgcggctgtgcagcagcaagagcatcgtgacggtgaacggtcagttcccggggccgccggtgttcgctagggagggcgacttcgtcgtcatccgcgtcgtcaaccacgtcccctacaacatgagcatccactggcacggcgtccggcagctgcggagcgggtgggcggacgggccggcgtacatcacgcaatgcccgatccagagcgggcagagctacgtgtacaagttcaccatcacggggcagcgcggcacgctgtggtggcacgcgcacatctcctggctgcgcgccaccgtctacggcgccatcgtcatcctgcccaagcccggcgtcccttacccgttcccggcgccctacaaggaggtccccgtcatcttcggcgagtggtggacggcggacacggaggcggtgatcagccaggcgctccagaccggcggaggacccaacgtctccgacgccttcaccatcaacgggctgcctggcccgctctacaactgctctgcaaaagacacgttcaagctgaaggtgaagcccgggaagacgtacatgctcagaataataaatgcagcattaaacgacgagctcttcttctccatcgccggccacccactcaccgtcgtcgacgtcgacgcggtctacatcaagcccatcaccgtcgacaccatcctcatcacccccgggcagaccaccaacgtgctcctcaccaccaagccgtcctaccccggcgccacctactacatgctggccgcgccctactccaccgccaggccgggcaccttcgacaacaccaccgtggccggcatcctcgagtacgaggaccccacgtcccctcccccgcacgcggccttcaacaagaacctcccggcgctgaagccgacgctgccgcagatcaacgacacgagcttcgtcgccaactacacggccaagctccgcagcctcgccaccgcggagtaccccgccgccgtgccgcaggaggtggaccggcggttcttcttcacggtcgggctgggcacgcacccgtgcgccgtgaacgggacgtgccagggccccaccaacagcagccggttcgcggcgtccgtgaacaacgtctccttcgtgctcccgacgacggcgctgctgcagtcgcacttcgccggaaagtccaagggggtgtactcgtccaacttccccgccgcgccgctcgtcccgttcaactacacggggacgccgcccaacaacaccaacgtggccaacggcaccaagctggtggtgctgccgtacggcgccagcgtggagctggtgttgcagggcaccagcatcctcggcgccgagagccacccgctgcacctccacggcttcaacttcttcgtggtcggccaagggttcggcaacttcgaccccgccaaggacccggccaagtacaacctcgtcgaccccgtcgagcggaacaccgtcggcgtgccggcggccggctgggtggccatccggttccgcgcagacaatccaggggtatggtttatgcattgccacttggaggttcacgtcagctggggcctgaaaatggcatggctggtgctggacggagaccgccccaacgagaagctgctgcctccgccgtctgatctccccaggtgc

SEQ ID NO: 627 - DNA, 1737 bp, Artificial sequence
  miRNA-Resistant target example
atggctacctcctatctgctgccttgctatgtcctcatcactgtgctcgtgctcttcttctccgtcgacgttacggaaggggccatcagggagtaccagttcgatgtgcaaatgacgaatgtgacgcggctgtgcagcagcaagagcatcgtgacggtgaacggtcagttcccggggccgccggtgttcgctagggagggcgacttcgtcgtcatccgcgtcgtcaaccacgtcccctacaacatgagcatccactggcacggcgtccggcagctgcggagcgggtgggcggacgggccggcgtacatcacgcaatgcccgatccagagcgggcagagctacgtgtacaagttcaccatcacggggcagcgcggcacgctgtggtggcacgcgcacatctcctggctgcgcgccaccgtctacggcgccatcgtcatcctgcccaagcccggcgtcccttacccgttcccggcgccctacaaggaggtccccgtcatcttcggcgagtggtggacggcggacacggaggcggtgatcagccaggcgctccagaccggcggaggacccaacgtctccgacgccttcaccatcaacgggctgcctggcccgctctacaactgctctgcaaaagacacgttcaagctgaaggtgaagcccgggaagacgtacatgctccgcataataaatgcagcattaaacgacgagctcttcttctccatcgccggccacccactcaccgtcgtcgacgtcgacgcggtctacatcaagcccatcaccgtcgacaccatcctcatcacccccgggcagaccaccaacgtgctcctcaccaccaagccgtcctaccccggcgccacctactacatgctggccgcgccctactccaccgccaggccgggcaccttcgacaacaccaccgtggccggcatcctcgagtacgaggaccccacgtcccctcccccgcacgcggccttcaacaagaacctcccggcgctgaagccgacgctgccgcagatcaacgacacgagcttcgtcgccaactacacggccaagctccgcagcctcgccaccgcggagtaccccgccgccgtgccgcaggaggtggaccggcggttcttcttcacggtcgggctgggcacgcacccgtgcgccgtgaacgggacgtgccagggccccaccaacagcagccggttcgcggcgtccgtgaacaacgtctccttcgtgctcccgacgacggcgctgctgcagtcgcacttcgccggaaagtccaagggggtgtactcgtccaacttccccgccgcgccgctcgtcccgttcaactacacggggacgccgcccaacaacaccaacgtggccaacggcaccaagctggtggtgctgccgtacggcgccagcgtggagctggtgttgcagggcaccagcatcctcggcgccgagagccacccgctgcacctccacggcttcaacttcttcgtggtcggccaagggttcggcaacttcgaccccgccaaggacccggccaagtacaacctcgtcgaccccgtcgagcggaacaccgtcggcgtgccggcggccggctgggtggccatccggttccgcgcagacaatccaggggtatggtttatgcattgccacttggaggttcacgtcagctggggcctgaaaatggcatggctggtgctggacggagaccgccccaacgagaagctgctgcctccgccgtctgatctccccaggtgc

SEQ ID NO: 628 - DNA, 1737 bp, Artificial sequence; identical to SEQ ID NO: 627
  miRNA-Resistant target example

SEQ ID NO: 629 - DNA, 1737 bp, Artificial sequence; identical to SEQ ID NO: 627
  miRNA-Resistant target example

SEQ ID NO: 630 - DNA, 1737 bp, Artificial sequence; identical to SEQ ID NO: 627
  miRNA-Resistant target example

SEQ ID NO: 631 - DNA, 1410 bp, Artificial sequence
  miRNA-Resistant target example
atggccgggacggaggtggaggacccgccggcggcggcgttggaggtgcccgcgaaacgcggccttctgcggtacaactcgccgctggcgcaggtgtccctgctgggcctcatctgcttctgctgccccggcatgttcaacgcgctgtcgggcctcggcggcggaggccaggtcgaccccaccatcgccgacaacgccaacaccgcgctctacgcctgcttcgcggtgttcggcgtgctgggcggcgccgcgcacaacctgctgggcccgcgcgcgacgctgctggccggcgcgctcacgtacccgctctacgccggctccttcctctactacaaccaccgcccgggctcgcaggtgttccccgtcacggcgggcgccctgctcggcgccggcgcgggcttcctctgggcggcgcagggcgccgtcatgacgtcgtacccgccgcccaaccgccggggcacctacatctccctcttctggtgcctcttcaacctgggcggcgtcctcggcggcctcctccctttcgccctcaactacaaccgcggggacaagaaagggagcgtcagcgacggcacgtacatcgccttcatggcattcatgttagtaggagcagcattaacagtgctcgtgctgccgcccgccaggatcgtccgcgacgacggcaccagggccaccagggtcaccttctcctccccggccaccgagggcgccgagatcctcaagctcttcgccaactggaagatgctgctcgcgctgccggccgcctgggccagcaacttcttctacacctaccagttcaacaacgtcaacagcggcctcttcacgctccgcaccaggggcctcaacaacgtcttctactggggcgcgcagatgatcggctccgccggcatcggctacttcctcgacttcggcttcgccagccgccgaaagagggggctgttcggggtcgccgccgtcgccgccgtcggaacggccatctggggaggcggtctggccaaccagctcagctacaatgccgtgccggtgcccgaccccatcgatttcaaggacggccaccgctacgccgggcccttcctgctctacttcagctacggactgctagatgccatgttccagagccttatctactggatcatcggcgcactcgccaacgactcccaaatcctcagcaggtacgtcgggttctacaagggggtgcagagtgcgggagcggcggtggcatggcaggtggacaggcgccacacgcccctcatgtcccagctgatcgtcaactgggggctcatgaccatcagctaccccttgcttgcgctgctggtgttcctggccgtgaaggacgagagctactcggtttcgtcggtggaggacggccgggagaaggacagcaagctgtccgcgccgaccagcttccac

SEQ ID NO: 632 - DNA, 1410 bp, Artificial sequence
  miRNA-Resistant target example
atggccgggacggaggtggaggacccgccggcggcggcgttggaggtgcccgcgaaacgcggccttctgcggtacaactcgccgctggcgcaggtgtccctgctgggcctcatctgcttctgctgccccggcatgttcaacgcgctgtcgggcctcggcggcggaggccaggtcgaccccaccatcgccgacaacgccaacaccgcgctctacgcctgcttcgcggtgttcggcgtgctgggcggcgccgcgcacaacctgctgggcccgcgcgcgacgctgctggccggcgcgctcacgtacccgctctacgccggctccttcctctactacaaccaccgcccgggctcgcaggtgttccccgtcacggcgggcgccctgctcggcgccggcgcgggcttcctctgggcggcgcagggcgccgtcatgacgtcgtacccgccgcccaaccgccggggcacctacatctccctcttctggtgcctcttcaacctgggcggcgtcctcggcggcctcctccctttcgccctcaactacaaccgcggggacaagaaagggagcgtcagcgacggcacgtacatcgccttcatggcattcatgctcgtaggagcagcactcacagtgctcgtgctgccgcccgccaggatcgtccgcgacgacggcaccagggccaccagggtcaccttctcctccccggccaccgagggcgccgagatcctcaagctcttcgccaactggaagatgctgctcgcgctgccggccgcctgggccagcaacttcttctacacctaccagttcaacaacgtcaacagcggcctcttcacgctccgcaccaggggcctcaacaacgtcttctactggggcgcgcagatgatcggctccgccggcatcggctacttcctcgacttcggcttcgccagccgccgaaagagggggctgttcggggtcgccgccgtcgccgccgtcggaacggccatctggggaggcggtctggccaaccagctcagctacaatgccgtgccggtgcccgaccccatcgatttcaaggacggccaccgctacgccgggcccttcctgctctacttcagctacggactgctagatgccatgttccagagccttatctactggatcatcggcgcactcgccaacgactcccaaatcctcagcaggtacgtcgggttctacaagggggtgcagagtgcgggagcggcggtggcatggcaggtggacaggcgccacacgcccctcatgtcccagctgatcgtcaactgggggctcatgaccatcagctaccccttgcttgcgctgctggtgttcctggccgtgaaggacgagagctactcggtttcgtcggtggaggacggccgggagaaggacagcaagctgtccgcgccgaccagcttccac

SEQ ID NO: 633 - DNA, 1410 bp, Artificial sequence; identical to SEQ ID NO: 632
  miRNA-Resistant target example

SEQ ID NO: 634 - DNA, 1410 bp, Artificial sequence; identical to SEQ ID NO: 632
  miRNA-Resistant target example

SEQ ID NO: 635 - DNA, 1410 bp, Artificial sequence; identical to SEQ ID NO: 632
  miRNA-Resistant target example

SEQ ID NO: 636 - DNA, 1761 bp, Artificial sequence
  miRNA-Resistant target example
atggcgatctcctctgctcttccatgctcctccctcctcatggcggctgcccaactgatgctcctcgcctccgtcgtcgtccaagtgcaaggcatcacgaggcactacgacttcaatgtgaccatggcgaacgtgacacggctgtgcgccagcaagagcatcatcacggtgaacgggcagttccccgggcccaagatcgtggcgagggaaggcgaccggctcgtcatccgcgtcaccaaccacgcccagcacaacatctcgctgcactggcacggcatccggcagctgcgcacggggtgggcggacgggccggcgtacatcacgcagtgcccgatccagacggggcagagctacgtgtacaactacaccgtcgtggggcagcgcggcacgctgtggtggcacgcgcacatctcctggctgcgcgccaccgtctacgggcccctcgtcatcctgcccaagctcggcgtcccctacccgttcccggcgccctacaaggaggtccccgtcatcttcggtgagtggtggctggcggacacggaggtggtgatcaagcaggcgcttcagctcggcgctggccccaatgtctctgacgcccacaccatcaacggcctgccagggccgctctacaactgctctgccaaagacacgtacaagctgaaggtgaagcccgggaagacgtacatgctgagattaataaatgcagcattaaatgacgagctcttcttctccgtcgccaaccactcgctcacggtcgtcgaggtcgacgccgtctacgtcaagcccttcaccgtcgacacgctgctcatcgcgccgggccagaccaccaacgtgctgctcgccgccaagccatcctacccgggcgccaactactacatgtccgccgcgccctactccacggccaggccggccaccttcgacaacaccaccgtcgccggcatcctcgagtacgagctgtaccccgacgcgccccggccctccgcctccgcggggagcttcaacgaggccctgccgctctacagaccgaccctgccgcagctcaacgacaccagcttcgtcggcaacttcacggccaagctccgcagcctcgcgacgccgcggtacccggcggccgtgccgcggacggtggacaggcggttcttcttcgcggtcgggctcggcacgcacccgtgccccgccaacgccacgtgccagggccccaccaacaccacgcagttcgcggcgtccgtcaacaacgtctccttcgtgctccccaccaaggcgctgctgcactcccacttcaccggcctgtccagcggcgtctactcgccggacttccccgtcgcgcccctggcgccgttcaactacacggggacgccgcccaacaacaccaacgtggccagcgggaccaagctcatggtcgtcccgtacggcgccaacgtggagctcgtcatgcagggcaccagcatcctcggcgtcgagagccacccgctgcacctgcacggcttcaacttcttcgtggtcggccaagggtacggcaactacgaccccgtcaacgacccgtccaagttcaacctcgtcgaccccgtcgagcgcaacaccgtcggcgtgccggccggcggatgggtggccatccgcttcctcgccgacaaccccggggtctggttcatgcattgccatttggaggcgcacacaacatggggcctcaggatggcatggttggtgctcgacggcagcctcccgcaccagaagctgctcccgccgccgtcagacttacccaaatgt

SEQ ID NO: 637 - DNA, 1761 bp, Artificial sequence
  miRNA-Resistant target example
atggcgatctcctctgctcttccatgctcctccctcctcatggcggctgcccaactgatgctcctcgcctccgtcgtcgtccaagtgcaaggcatcacgaggcactacgacttcaatgtgaccatggcgaacgtgacacggctgtgcgccagcaagagcatcatcacggtgaacgggcagttccccgggcccaagatcgtggcgagggaaggcgaccggctcgtcatccgcgtcaccaaccacgcccagcacaacatctcgctgcactggcacggcatccggcagctgcgcacggggtgggcggacgggccggcgtacatcacgcagtgcccgatccagacggggcagagctacgtgtacaactacaccgtcgtggggcagcgcggcacgctgtggtggcacgcgcacatctcctggctgcgcgccaccgtctacgggcccctcgtcatcctgcccaagctcggcgtcccctacccgttcccggcgccctacaaggaggtccccgtcatcttcggtgagtggtggctggcggacacggaggtggtgatcaagcaggcgcttcagctcggcgctggccccaatgtctctgacgcccacaccatcaacggcctgccagggccgctctacaactgctctgccaaagacacgtacaagctgaaggtgaagcccgggaagacgtacatgctgcgcttaataaatgcagcattaaatgacgagctcttcttctccgtcgccaaccactcgctcacggtcgtcgaggtcgacgccgtctacgtcaagcccttcaccgtcgacacgctgctcatcgcgccgggccagaccaccaacgtgctgctcgccgccaagccatcctacccgggcgccaactactacatgtccgccgcgccctactccacggccaggccggccaccttcgacaacaccaccgtcgccggcatcctcgagtacgagctgtaccccgacgcgccccggccctccgcctccgcggggagcttcaacgaggccctgccgctctacagaccgaccctgccgcagctcaacgacaccagcttcgtcggcaacttcacggccaagctccgcagcctcgcgacgccgcggtacccggcggccgtgccgcggacggtggacaggcggttcttcttcgcggtcgggctcggcacgcacccgtgccccgccaacgccacgtgccagggccccaccaacaccacgcagttcgcggcgtccgtcaacaacgtctccttcgtgctccccaccaaggcgctgctgcactcccacttcaccggcctgtccagcggcgtctactcgccggacttccccgtcgcgcccctggcgccgttcaactacacggggacgccgcccaacaacaccaacgtggccagcgggaccaagctcatggtcgtcccgtacggcgccaacgtggagctcgtcatgcagggcaccagcatcctcggcgtcgagagccacccgctgcacctgcacggcttcaacttcttcgtggtcggccaagggtacggcaactacgaccccgtcaacgacccgtccaagttcaacctcgtcgaccccgtcgagcgcaacaccgtcggcgtgccggccggcggatgggtggccatccgcttcctcgccgacaaccccggggtctggttcatgcattgccatttggaggcgcacacaacatggggcctcaggatggcatggttggtgctcgacggcagcctcccgcaccagaagctgctcccgccgccgtcagacttacccaaatgt

SEQ ID NO: 638 - DNA, 1761 bp, Artificial sequence; identical to SEQ ID NO: 637
  miRNA-Resistant target example

SEQ ID NO: 639 - DNA, 1761 bp, Artificial sequence; identical to SEQ ID NO: 637
  miRNA-Resistant target example

SEQ ID NO: 640 - DNA, 1761 bp, Artificial sequence; identical to SEQ ID NO: 637
  miRNA-Resistant target example

SEQ ID NO: 641 - DNA, 1752 bp, Artificial sequence
  miRNA-Resistant target example
atggcgatctcctctgctcttccatgctcctccctcctcatggcggctgcccaactgaagctcctcgcctccgttgtcgtccaagtgcaaggcatcacgaggcactacgacttcaatgtgaccatggcgaacgtgacgcggctgtgcgccaccaagagcatcgtcacggtgaacgggcagttccccggccccaagatcgtcgcgagggaaggcgaccgcctcatcatccgcgtcaccaaccaggcccagcacaacatctcgctgcactggcacggtatccggcagctgcgcacggggtgggcggacgggccggcgtacatcacgcagtgcccgatccagacggggcagagctacgtgtacaactacaccgtcgccgggcagcgcggcacgctgtggtggcacgcgcacatctcctggctgcgcgccaccgtctacgggcccctcgtcgtcctgcccaggcccggcgtcccctacccgttcccggcgccgtacaaggaggtccccgtcatcttcggtgagtggtggctggcggacacggaggtggtggtcgagcaggcgctccagctcggcgctggcccgaacgtctccgacgcccacaccatcaacggcctgccaggaccgctctacaattgctctgccaaagacacgtacaagctgaaggtgaagccagggaagacgtacatgctcagattaataaatgcagcattaaatgacgagctcttcttctccgtcgccaaccactcgctcaccgtcgtcgaggtcgacgccgtctacgtcaagcccttcaccgtcgacaccctgcccatcgccccgggccagaccaccaacgtgctcctcgcagccaagcccttctacccgggcgccaactactacatgtccgccaagccctactccaccgccaggccggccaccttcgacaacaccaccgtcgccggcatcctcgagtacgagtaccccgacgcgccatcctcctccgcggcgagcttcgacaaggccctgccgctccacaggccgaccctgccgcagctgaacgacaccagcttcgtcggcaacttcacggccaagctccgcagcctcgcgacgccgcagtacccggcggccgtgccgcggacggtggacagagcgttcttcttcacggtggggctcggcacgcacccgtgccccgggaacgccacgtgcctgggccccaccaacacgacgcagttcgcggcggccgtgaacaacgtctccttcgtgctcccgaccagggcgctcctgcactcgcacttcgccggcctgtccagcggcgtctactcgtcggacttccccgtcgcgcccctcacgccgttcaactacacggggacgccgccaaacaacaccaacgtggccagcgggaccaagctgatggtcgtcccgtacggcgccaacgtggagctggtgttgcagggcaccagcatcctcggcgtcgagagccacccgctgcacctgcacggcttcaacttcttcgtcgtcggccaaggctacggcaactacgacccggtgaacgacccgcccaagttcaacctcgtcgaccccgtcgagcggaacaccgtcggcgtgccagccggcggctgggtggccatccgcttccttgccgacaaccccggggtatggttcatgcactgtcacttggaggtgcacacaacatggggcctcaggatggcatggttggtgctcgacggcagcctcccgcaccagaagctgctcccaccgccgtccgatcttcccaaatgt

SEQ ID NO: 642 - DNA, 1752 bp, Artificial sequence
  miRNA-Resistant target example
atggcgatctcctctgctcttccatgctcctccctcctcatggcggctgcccaactgaagctcctcgcctccgttgtcgtccaagtgcaaggcatcacgaggcactacgacttcaatgtgaccatggcgaacgtgacgcggctgtgcgccaccaagagcatcgtcacggtgaacgggcagttccccggccccaagatcgtcgcgagggaaggcgaccgcctcatcatccgcgtcaccaaccaggcccagcacaacatctcgctgcactggcacggtatccggcagctgcgcacggggtgggcggacgggccggcgtacatcacgcagtgcccgatccagacggggcagagctacgtgtacaactacaccgtcgccgggcagcgcggcacgctgtggtggcacgcgcacatctcctggctgcgcgccaccgtctacgggcccctcgtcgtcctgcccaggcccggcgtcccctacccgttcccggcgccgtacaaggaggtccccgtcatcttcggtgagtggtggctggcggacacggaggtggtggtcgagcaggcgctccagctcggcgctggcccgaacgtctccgacgcccacaccatcaacggcctgccaggaccgctctacaattgctctgccaaagacacgtacaagctgaaggtgaagccagggaagacgtacatgctccgcttaataaatgcagcattaaatgacgagctcttcttctccgtcgccaaccactcgctcaccgtcgtcgaggtcgacgccgtctacgtcaagcccttcaccgtcgacaccctgcccatcgccccgggccagaccaccaacgtgctcctcgcagccaagcccttctacccgggcgccaactactacatgtccgccaagccctactccaccgccaggccggccaccttcgacaacaccaccgtcgccggcatcctcgagtacgagtaccccgacgcgccatcctcctccgcggcgagcttcgacaaggccctgccgctccacaggccgaccctgccgcagctgaacgacaccagcttcgtcggcaacttcacggccaagctccgcagcctcgcgacgccgcagtacccggcggccgtgccgcggacggtggacagagcgttcttcttcacggtggggctcggcacgcacccgtgccccgggaacgccacgtgcctgggccccaccaacacgacgcagttcgcggcggccgtgaacaacgtctccttcgtgctcccgaccagggcgctcctgcactcgcacttcgccggcctgtccagcggcgtctactcgtcggacttccccgtcgcgcccctcacgccgttcaactacacggggacgccgccaaacaacaccaacgtggccagcgggaccaagctgatggtcgtcccgtacggcgccaacgtggagctggtgttgcagggcaccagcatcctcggcgtcgagagccacccgctgcacctgcacggcttcaacttcttcgtcgtcggccaaggctacggcaactacgacccggtgaacgacccgcccaagttcaacctcgtcgaccccgtcgagcggaacaccgtcggcgtgccagccggcggctgggtggccatccgcttccttgccgacaaccccggggtatggttcatgcactgtcacttggaggtgcacacaacatggggcctcaggatggcatggttggtgctcgacggcagcctcccgcaccagaagctgctcccaccgccgtccgatcttcccaaatgt

SEQ ID NO: 643 - DNA, 1752 bp, Artificial sequence; identical to SEQ ID NO: 642
  miRNA-Resistant target example

SEQ ID NO: 644 - DNA, 1752 bp, Artificial sequence; identical to SEQ ID NO: 642
  miRNA-Resistant target example

SEQ ID NO: 645 - DNA, 1752 bp, Artificial sequence; identical to SEQ ID NO: 642
  miRNA-Resistant target example

SEQ ID NO: 646 - DNA, 1548 bp, Artificial sequence
  miRNA-Resistant target example
atgacatcgatcgtctggtctgtctatactctctcccgttcatggccggctgtctcgatcaatgcgcgctgcatgcatggcgtgtgcaggcacggcatccgccagataaggactgggtgggcggacgggccggagttcgtgacgcagtgccccatcaggcccggcggcagctacaagtaccggttcaccatccaggggcaggagggcacgctgtggtggcacgcgcacagctcctggctcagggccaccgtctacggcgcgctcatcatccgccccagggagaacaagacctacccattcgccaagccctcgcgagaagtccccgtcatcctcggtgagtggtgggatgcgaacccgatcgacgtcatccgggaggcgcagaggaccggcggcggtcccaacgtctccgacgcgttcaccatcaacggccagcccggcgacctgtacaaatgctccaacaaagagactacggccatcccggtgaaggccggcgagacggcgctgctgagatttataaatgcagcattaaatcacgagctgttcgtcaccatcgcgcagcacaagatgacggtcgtcgccaccgacgcgtcctacaccaagcccttcaccacctcggtgctcatgctcgcgccgggccagaccaccgacgtcctcgtcaccatggaccagccgcccacccgctactacgtcgccgcgcgcgcctacgtctccggccagaacgtggccttcgacaacaccaccaccacggccgtcctcgagtacgactgcggctgcgcctccgacttcggccccaagatacagccggcgttcccggcggcgctaccggccttcaacgacacgtccgccgccaccgccttcgccgccgggatcaggagccccgaccgggtcaaggtccacgagaacgtcgacgagtacctcttcttcaccgtcggcctcggcctcttcaactgcaagccgggccagctctgcgccgggcccaacaacaacacccgcttcgcggccagcatgaacaacgtctccttcgtcttcccgcagaccgactccctcctccacgcgcactactacaagatccccggcgtcttcaccaccgacttcccggcatacccgcccgtgcagttcgactacacggggcagaacgtcagccaggccctgtggcagccggtccccgccaccaagctgtacccgctcaggttcggctccgtggtgcagctcgtcctgcaggacaccagcatcgtcacgcccgagaaccaccccatccacatccacggctacgatttcttcatcctcgccgagggcttcggcaacttcgaccccaagaaggacgtcgagaagttcaactacgtcgacccgccccagaggaacaccgtggcggtgcctgtcaacggttgggcggtcatccagttcgtcgccgacaaccctggtgtgtggctcatgcattgccatctggacgtgcacatcacctggggcctggcaatggctttcctagtggaggacggctatggcgaactgcagtcgctggagccgcccccagttgatcttcccatgtgc

SEQ ID NO: 647 - DNA, 1548 bp, Artificial sequence
  miRNA-Resistant target example
atgacatcgatcgtctggtctgtctatactctctcccgttcatggccggctgtctcgatcaatgcgcgctgcatgcatggcgtgtgcaggcacggcatccgccagataaggactgggtgggcggacgggccggagttcgtgacgcagtgccccatcaggcccggcggcagctacaagtaccggttcaccatccaggggcaggagggcacgctgtggtggcacgcgcacagctcctggctcagggccaccgtctacggcgcgctcatcatccgccccagggagaacaagacctacccattcgccaagccctcgcgagaagtccccgtcatcctcggtgagtggtgggatgcgaacccgatcgacgtcatccgggaggcgcagaggaccggcggcggtcccaacgtctccgacgcgttcaccatcaacggccagcccggcgacctgtacaaatgctccaacaaagagactacggccatcccggtgaaggccggcgagacggcgctgctgcggtttataaatgcagcattaaatcacgagctgttcgtcaccatcgcgcagcacaagatgacggtcgtcgccaccgacgcgtcctacaccaagcccttcaccacctcggtgctcatgctcgcgccgggccagaccaccgacgtcctcgtcaccatggaccagccgcccacccgctactacgtcgccgcgcgcgcctacgtctccggccagaacgtggccttcgacaacaccaccaccacggccgtcctcgagtacgactgcggctgcgcctccgacttcggccccaagatacagccggcgttcccggcggcgctaccggccttcaacgacacgtccgccgccaccgccttcgccgccgggatcaggagccccgaccgggtcaaggtccacgagaacgtcgacgagtacctcttcttcaccgtcggcctcggcctcttcaactgcaagccgggccagctctgcgccgggcccaacaacaacacccgcttcgcggccagcatgaacaacgtctccttcgtcttcccgcagaccgactccctcctccacgcgcactactacaagatccccggcgtcttcaccaccgacttcccggcatacccgcccgtgcagttcgactacacggggcagaacgtcagccaggccctgtggcagccggtccccgccaccaagctgtacccgctcaggttcggctccgtggtgcagctcgtcctgcaggacaccagcatcgtcacgcccgagaaccaccccatccacatccacggctacgatttcttcatcctcgccgagggcttcggcaacttcgaccccaagaaggacgtcgagaagttcaactacgtcgacccgccccagaggaacaccgtggcggtgcctgtcaacggttgggcggtcatccagttcgtcgccgacaaccctggtgtgtggctcatgcattgccatctggacgtgcacatcacctggggcctggcaatggctttcctagtggaggacggctatggcgaactgcagtcgctggagccgcccccagttgatcttcccatgtgc

SEQ ID NO: 648 - DNA, 1548 bp, Artificial sequence; identical to SEQ ID NO: 647
  miRNA-Resistant target example

SEQ ID NO: 649 - DNA, 1548 bp, Artificial sequence; identical to SEQ ID NO: 647
  miRNA-Resistant target example

SEQ ID NO: 650 - DNA, 1548 bp, Artificial sequence; identical to SEQ ID NO: 647
  miRNA-Resistant target example

SEQ ID NO: 651 - DNA, 660 bp, Artificial sequence
  miRNA-Resistant target example
atgtgtgcacggtccatcgctctcgcgtcgctcggtctgcgcgtccctgcgtccggatcctctccctccagctcggcgcccatccatgctgcgtcgccctctctctcatctccaagccgagaccctcgccgtgaagcttccatgtggccgcgcgtactccctctgcttctccctcgtggcgctcaaccttgccgagcaagtctaccctggttatttcatagcccggctctgccccatcgtcgatcgcccatctccatggtcgcgcgccctccagttctatggccgtgccgcgcgtcctggagctcaccgcgcccggccaagctcccctgtgcacgcccagccactcctctctcccttgcagcgcgcgtccctctgcttgccaaagcaccagctcggtcgctccgttcgtgcttccgcggaggccgcagctcttcctctggtgcgcgcgccccatctccctggtgctcggccagctcacccatggcgcgccgtgctcctctgctctccccgccggcccgagctccctatggcgtgcatctccctggcaaaagctctctcttccctctcccatggcgcgtctcgagctccacctcgggtcgtcgtctccgagctcgaccccaaactgttgtgcgtcctatcctatctccgagtcgaggttcc

SEQ ID NO: 652 - DNA, 660 bp, Artificial sequence
  miRNA-Resistant target example
atgtgtgcacggtccatcgctctcgcgtcgctcggtctgcgcgtccctgcgtccggatcctctccctccagctcggcgcccatccatgctgcgtcgccctctctctcatctccaagccgagaccctcgccgtgaagcttccatgtggccgcgcgtactccctctgcttctccctcgtggcgctcaaccttgccgagctagtctaccctggttatttcatagcccggctctgccccatcgtcgatcgcccatctccatggtcgcgcgccctccagttctatggccgtgccgcgcgtcctggagctcaccgcgcccggccaagctcccctgtgcacgcccagccactcctctctcccttgcagcgcgcgtccctctgcttgccaaagcaccagctcggtcgctccgttcgtgcttccgcggaggccgcagctcttcctctggtgcgcgcgccccatctccctggtgctcggccagctcacccatggcgcgccgtgctcctctgctctccccgccggcccgagctccctatggcgtgcatctccctggcaaaagctctctcttccctctcccatggcgcgtctcgagctccacctcgggtcgtcgtctccgagctcgaccccaaactgttgtgcgtcctatcctatctccgagtcgaggttcc

SEQ ID NO: 653 - DNA, 660 bp, Artificial sequence; identical to SEQ ID NO: 652
  miRNA-Resistant target example

SEQ ID NO: 654 - DNA, 660 bp, Artificial sequence; identical to SEQ ID NO: 652
  miRNA-Resistant target example

SEQ ID NO: 655 - DNA, 660 bp, Artificial sequence
  miRNA-Resistant target example
atgtgtgcacggtccatcgctctcgcgtcgctcggtctgcgcgtccctgcgtccggatcctctccctccagctcggcgcccatccatgctgcgtcgccctctctctcatctccaagccgagaccctcgccgtgaagcttccatgtggccgcgcgtactccctctgcttctccctcgtggcgctcaaccttgccgagcatccctaccctggttatttcatagcccggctctgccccatcgtcgatcgcccatctccatggtcgcgcgccctccagttctatggccgtgccgcgcgtcctggagctcaccgcgcccggccaagctcccctgtgcacgcccagccactcctctctcccttgcagcgcgcgtccctctgcttgccaaagcaccagctcggtcgctccgttcgtgcttccgcggaggccgcagctcttcctctggtgcgcgcgccccatctccctggtgctcggccagctcacccatggcgcgccgtgctcctctgctctccccgccggcccgagctccctatggcgtgcatctccctggcaaaagctctctcttccctctcccatggcgcgtctcgagctccacctcgggtcgtcgtctccgagctcgaccccaaactgttgtgcgtcctatcctatctccgagtcgaggttcc

SEQ ID NO: 656 - DNA, 1296 bp, Artificial sequence
  miRNA-Resistant target example
atggattgggatctcaaggcggcgggcgcgtgggacctcgcggagctggagcaggaccacgcggccgcggcgccgtcgtcggggggccacgccgccaatgctgccgcggcgggcacggggacggagagccgcccgccggcgcccggggcagcaggggcacccgccgagtgctccgtggacctgaagctgggcgggatgggcgagtgcgagcccggcgcggcccgcagggagagggaggccgcggcgggggcggcgaagcggccgcgccccgccgggcccggcgggcagcagcagcagcagtgcccgtcgtgcgcggtggacgggtgcagggcggacctgggcaagtgccgcgactaccaccggcggcacaaggtgtgcgaggcgcactccaagacccccgtcgtcgtcgtcgccggccgcgagatgcgcttctgccagcagtgcagcaggttccatctacttgcagagttcgacgccgacaagcgcagctgcagaaagcgtctggacgggcacaatcgccgccgcaggaagccacagccagacaccatggcttctgctagctttatcgcaagccagcaaggcacgcgattctcaccatttgcgcatccaagactggaggcgagctggccgccgggggtgatgaaaaacgaggagagtccatatcacatcactcaccaaatccctctgggatccagcagcagcggcaacaggcagcagcatttcgtggctctgggagccgccacgcctgcctacgccaaggaaggccggcgcttccctttcctgcaggagggcgagataagcttcgccaccggcgtggtgctggagccgcccgcgtcggctccagcgtgccagccgctcctcaggacgggagcaccatccgagagcagcggcgcaggcggcagtaagatgttctccgatcaggggctggctcgcgtgctcgacagcgattgcgcattaagcttattatcagcgccggccaactcctccggcatcgacgtcagcaggatggtccgcccgactgaacacgtccccatggcccagcagcccgtggttccgggcctgcagttcggcagcgcgtcgtggttcccgcgcccccaggcttccacgggcggctccttcgtcccctcctgccccgccgcggtggagggcgagcagcagctgaacgccgtgctgggccccaacgacagcgaggtgagcatgaactacggcgggatgttccacgtcggcggcggcagcggcggcggcgagggctcctcggacggcggcacctcgtcgtcgatgcccttctcgtggcag

SEQ ID NO: 657 - DNA, 1296 bp, Artificial sequence
  miRNA-Resistant target example
atggattgggatctcaaggcggcgggcgcgtgggacctcgcggagctggagcaggaccacgcggccgcggcgccgtcgtcggggggccacgccgccaatgctgccgcggcgggcacggggacggagagccgcccgccggcgcccggggcagcaggggcacccgccgagtgctccgtggacctgaagctgggcgggatgggcgagtgcgagcccggcgcggcccgcagggagagggaggccgcggcgggggcggcgaagcggccgcgccccgccgggcccggcgggcagcagcagcagcagtgcccgtcgtgcgcggtggacgggtgcagggcggacctgggcaagtgccgcgactaccaccggcggcacaaggtgtgcgaggcgcactccaagacccccgtcgtcgtcgtcgccggccgcgagatgcgcttctgccagcagtgcagcaggttccatctacttgcagagttcgacgccgacaagcgcagctgcagaaagcgtctggacgggcacaatcgccgccgcaggaagccacagccagacaccatggcttctgctagctttatcgcaagccagcaaggcacgcgattctcaccatttgcgcatccaagactggaggcgagctggccgccgggggtgatgaaaaacgaggagagtccatatcacatcactcaccaaatccctctgggatccagcagcagcggcaacaggcagcagcatttcgtggctctgggagccgccacgcctgcctacgccaaggaaggccggcgcttccctttcctgcaggagggcgagataagcttcgccaccggcgtggtgctggagccgcccgcgtcggctccagcgtgccagccgctcctcaggacgggagcaccatccgagagcagcggcgcaggcggcagtaagatgttctccgatcaggggctggctcgcgtgctcgactcggattgcgcattatcgttattatcagcgccggccaactcctccggcatcgacgtcagcaggatggtccgcccgactgaacacgtccccatggcccagcagcccgtggttccgggcctgcagttcggcagcgcgtcgtggttcccgcgcccccaggcttccacgggcggctccttcgtcccctcctgccccgccgcggtggagggcgagcagcagctgaacgccgtgctgggccccaacgacagcgaggtgagcatgaactacggcgggatgttccacgtcggcggcggcagcggcggcggcgagggctcctcggacggcggcacctcgtcgtcgatgcccttctcgtggcag

SEQ ID NO: 658 - DNA, 1296 bp, Artificial sequence; identical to SEQ ID NO: 657
  miRNA-Resistant target example

SEQ ID NO: 659 - DNA, 1296 bp, Artificial sequence; identical to SEQ ID NO: 657
  miRNA-Resistant target example

SEQ ID NO: 660 - DNA, 1296 bp, Artificial sequence; identical to SEQ ID NO: 657
  miRNA-Resistant target example

SEQ ID NO: 661 - DNA, 975 bp, Artificial sequence
  miRNA-Resistant target example
atggactgggcagcggcgtccgggtctccgtcgtggggcgcggcggcgacggaccccggtccgaccatgctgtccttcgcaggcccgtcctcctccgccgccgacgccgaggtgcggctccaggatttcgccgcgggtcttgcccagagctcgcggccgactggggcggcgccgggagccgggaggaggtcccgcgcggccgtgggaggtgccggcgcggaggcgtgctccgtcgacggctgccgctctgatctcagccggtgccgcgagtaccaccggcggcataaggtctgtgaggcacactccaaggcgccggtggtggtcgtcggcggacaggagcggcgcttctgccagcaatgcagccggtttcacatgctgtccgagtttgacgaggaaaaaagaagttgccggaagcgtctggatggccataataggcgtcgaagaaagccacagcatgatctgacaaatctagggggtttctttccataccaccaagtgaatcagtttgagttctacccacaaacaattccaacagttggccagaattcggacgccgtgcacttggtgggccgtcagcagcctttctccatatcgttctcaagaacaccagacgagttccctttcccacagggtggcggtagcagtgtgctgcaccacctccatgcagcccgccctggccatcacgctgaaggcagcagccacactggaagcagcacacgcgacaacgctctctccggcacactgggcccagaatgcgcattaagcttattatcatcgtcgctgcgtcgcccctcaactgctggcgtccccgccgttggccaaccccaggttactgcctcttcgaccactgccgtgtcgcaggctgcaacggcagctgtggccactgctgcattcgcggccagtgctggccaccatgtgtttgttcctgatgctatgtttgaggatccatcacaggcactgccattctcttggcag

SEQ ID NO: 662 - DNA, 975 bp, Artificial sequence
  miRNA-Resistant target example
atggactgggcagcggcgtccgggtctccgtcgtggggcgcggcggcgacggaccccggtccgaccatgctgtccttcgcaggcccgtcctcctccgccgccgacgccgaggtgcggctccaggatttcgccgcgggtcttgcccagagctcgcggccgactggggcggcgccgggagccgggaggaggtcccgcgcggccgtgggaggtgccggcgcggaggcgtgctccgtcgacggctgccgctctgatctcagccggtgccgcgagtaccaccggcggcataaggtctgtgaggcacactccaaggcgccggtggtggtcgtcggcggacaggagcggcgcttctgccagcaatgcagccggtttcacatgctgtccgagtttgacgaggaaaaaagaagttgccggaagcgtctggatggccataataggcgtcgaagaaagccacagcatgatctgacaaatctagggggtttctttccataccaccaagtgaatcagtttgagttctacccacaaacaattccaacagttggccagaattcggacgccgtgcacttggtgggccgtcagcagcctttctccatatcgttctcaagaacaccagacgagttccctttcccacagggtggcggtagcagtgtgctgcaccacctccatgcagcccgccctggccatcacgctgaaggcagcagccacactggaagcagcacacgcgacaacgctctctccggcacactgggccccgaatgcgcattaagcttattatcatcgtcgctgcgtcgcccctcaactgctggcgtccccgccgttggccaaccccaggttactgcctcttcgaccactgccgtgtcgcaggctgcaacggcagctgtggccactgctgcattcgcggccagtgctggccaccatgtgtttgttcctgatgctatgtttgaggatccatcacaggcactgccattctcttggcag

SEQ ID NO: 663 - DNA, 975 bp, Artificial sequence; identical to SEQ ID NO: 662
  miRNA-Resistant target example

SEQ ID NO: 664 - DNA, 975 bp, Artificial sequence; identical to SEQ ID NO: 662
  miRNA-Resistant target example

SEQ ID NO: 665 - DNA, 975 bp, Artificial sequence
  miRNA-Resistant target example
atggactgggcagcggcgtccgggtctccgtcgtggggcgcggcggcgacggaccccggtccgaccatgctgtccttcgcaggcccgtcctcctccgccgccgacgccgaggtgcggctccaggatttcgccgcgggtcttgcccagagctcgcggccgactggggcggcgccgggagccgggaggaggtcccgcgcggccgtgggaggtgccggcgcggaggcgtgctccgtcgacggctgccgctctgatctcagccggtgccgcgagtaccaccggcggcataaggtctgtgaggcacactccaaggcgccggtggtggtcgtcggcggacaggagcggcgcttctgccagcaatgcagccggtttcacatgctgtccgagtttgacgaggaaaaaagaagttgccggaagcgtctggatggccataataggcgtcgaagaaagccacagcatgatctgacaaatctagggggtttctttccataccaccaagtgaatcagtttgagttctacccacaaacaattccaacagttggccagaattcggacgccgtgcacttggtgggccgtcagcagcctttctccatatcgttctcaagaacaccagacgagttccctttcccacagggtggcggtagcagtgtgctgcaccacctccatgcagcccgccctggccatcacgctgaaggcagcagccacactggaagcagcacacgcgacaacgctctctccggcacactgggcccagagtgcgcattaagcttattatcatcgtcgctgcgtcgcccctcaactgctggcgtccccgccgttggccaaccccaggttactgcctcttcgaccactgccgtgtcgcaggctgcaacggcagctgtggccactgctgcattcgcggccagtgctggccaccatgtgtttgttcctgatgctatgtttgaggatccatcacaggcactgccattctcttggcag

SEQ ID NO: 666 - DNA, 801 bp, Artificial sequence
  miRNA-Resistant target example
atgagctctgggagctttatgacgagtcaacaagggacgaggttctcgtcgttcccggttccaaggccggagccgagctggcccggagtcatcaaatccgaggacagcggctcatactacgcgcaccagcgccacccggtcctaagcagcaggccgcacttcgccggcgggggctccacgccgccggcctactcgtccaaggaaggccggcgcttcccgttcctccaggacggctgcgaccagcagcaggtcggcggcttcagcgcgggcgcgggggcgcagcagctcgaggtctcttccacgtccacggtgtgccagcccctcctcaaggccgccgccgccgccgccccaccgccgccgccagagagcagcagcagcaacaagatgttctccgacgggctcgcccccgccgtgctcgacagcgactgcgcattaagcttattatcatcccccgccaactcctccagcgtcgacgtgggccggatggtcgtccaccagcccgcggagcacatccccatggcgcagcccctcgtccccggcggcctccagcagcagcagcagcaccacccgttcggcggctcccccgcctggttcgcctgctcccaggccggctccagcgccgtctccgccggcggtttcgcctgccccccgggcgtggagagcgagcagctcaacaccgtgctggtgccgagctccgacggtggcggccacgacatgaacatgaactaccacggcatattccacgtcggcggcgacggctcctccgacgggacgtccccttcgctcccgttctcgtggcag

SEQ ID NO: 667 - DNA, 801 bp, Artificial sequence
  miRNA-Resistant target example
atgagctctgggagctttatgacgagtcaacaagggacgaggttctcgtcgttcccggttccaaggccggagccgagctggcccggagtcatcaaatccgaggacagcggctcatactacgcgcaccagcgccacccggtcctaagcagcaggccgcacttcgccggcgggggctccacgccgccggcctactcgtccaaggaaggccggcgcttcccgttcctccaggacggctgcgaccagcagcaggtcggcggcttcagcgcgggcgcgggggcgcagcagctcgaggtctcttccacgtccacggtgtgccagcccctcctcaaggccgccgccgccgccgccccaccgccgccgccagagagcagcagcagcaacaagatgttctccgacgggctcgcccccgccgtgctcgactcggactgcgcattatcgttattatcatcccccgccaactcctccagcgtcgacgtgggccggatggtcgtccaccagcccgcggagcacatccccatggcgcagcccctcgtccccggcggcctccagcagcagcagcagcaccacccgttcggcggctcccccgcctggttcgcctgctcccaggccggctccagcgccgtctccgccggcggtttcgcctgccccccgggcgtggagagcgagcagctcaacaccgtgctggtgccgagctccgacggtggcggccacgacatgaacatgaactaccacggcatattccacgtcggcggcgacggctcctccgacgggacgtccccttcgctcccgttctcgtggcag

SEQ ID NO: 668 - DNA, 801 bp, Artificial sequence; identical to SEQ ID NO: 667
  miRNA-Resistant target example

SEQ ID NO: 669 - DNA, 801 bp, Artificial sequence; identical to SEQ ID NO: 667
  miRNA-Resistant target example

SEQ ID NO: 670 - DNA, 801 bp, Artificial sequence; identical to SEQ ID NO: 667
  miRNA-Resistant target example

SEQ ID NO: 671 - DNA, 759 bp, Artificial sequence
  miRNA-Resistant target example
atgcatatgccaatccgctgtttcccgaatctactgttttttttttggtcagagcctggtaggttcaggagcttcctgctcgacttctcgtacccgagggttccaagcagcgtgagagatgatgcgtggcaatggcaagggatgcagcatggcggcgacaggatgctgctgggtaccgccagcgccatccagtggcatgggaaccaagaacctcacccaccacatcgcagcgcagctgcgggctatggcaaccatgcgtacaacaactgccatggtggcggcggcttggtagcagcagcagcgggggcgtcaatgctctcctctgccttcgagcccccgcctggcggtggcggatgtgtcgcaggagctaccgcggccgacagttcatgcgcattaagcttattatcaactcagccatgggatacgcccacccaaagtggcagcagccaccacaaccggtccccagcgatgtccgcggctgcaggcgccttcgaagtggcgccgtcgtccgtcgtggcgagcagctacacggcgtcgagctcctggtctggctcacgggaccctgccgacggcgccaggaaaaacgcgcagcgtcacgatgatggcctgcacctggtccatccaccaggccccgtccaccacggccacttctccggcgagctcgagctcgccctgcagggaagcggcccgccgcatgtcgaccatggcggcggcacctgcttcagccattctgacaccaacgcgatgaattggtccctg

SEQ ID NO: 672 - DNA, 759 bp, Artificial sequence
  miRNA-Resistant target example
atgcatatgccaatccgctgtttcccgaatctactgttttttttttggtcagagcctggtaggttcaggagcttcctgctcgacttctcgtacccgagggttccaagcagcgtgagagatgatgcgtggcaatggcaagggatgcagcatggcggcgacaggatgctgctgggtaccgccagcgccatccagtggcatgggaaccaagaacctcacccaccacatcgcagcgcagctgcgggctatggcaaccatgcgtacaacaactgccatggtggcggcggcttggtagcagcagcagcgggggcgtcaatgctctcctctgccttcgagcccccgcctggcggtggcggatgtgtcgcaggagctaccgcggccgactcctcatgcgcattaagcttattatcaactcagccatgggatacgcccacccaaagtggcagcagccaccacaaccggtccccagcgatgtccgcggctgcaggcgccttcgaagtggcgccgtcgtccgtcgtggcgagcagctacacggcgtcgagctcctggtctggctcacgggaccctgccgacggcgccaggaaaaacgcgcagcgtcacgatgatggcctgcacctggtccatccaccaggccccgtccaccacggccacttctccggcgagctcgagctcgccctgcagggaagcggcccgccgcatgtcgaccatggcggcggcacctgcttcagccattctgacaccaacgcgatgaattggtccctg

SEQ ID NO: 673 - DNA, 759 bp, Artificial sequence; identical to SEQ ID NO: 672
  miRNA-Resistant target example

SEQ ID NO: 674 - DNA, 759 bp, Artificial sequence; identical to SEQ ID NO: 672
  miRNA-Resistant target example

SEQ ID NO: 675 - DNA, 759 bp, Artificial sequence; identical to SEQ ID NO: 672
  miRNA-Resistant target example

SEQ ID NO: 676 - DNA, 1134 bp, Artificial sequence
  miRNA-Resistant target example
atggcgaccggcggcggcagcagcaggagcgacgacgtgcgcgggctcaagtttggcaagaagatctacttcgagcaggacggcgggagcgggagcggggcgggggcggtgggcggcaggaaggggaagggcgtggccaccggtggcgcgaggccggcgtccgccgcctccgcagcccagccgccgaggtgccaggtggacgggtgcggcgtggatctgagcgccgtcaagcagtactactgccggcacaaggtgtgcaacatgcactccaaggagccgcgcgtcttcgtcgccggcatcgagcagcgcttctgccaacagtgcagcaggttccaccagctacatgaatttgaccaagggaaacgtagctgccgccgccgcctcatcggtcacaacgagcgccggaggaagccaccacctggacctctcacttcacgatatggccggctcgctgcatcacttcaagagcctggcaggttcagaagcttcctgctcgacttctcgtacccaagggttccaagcagcgtgagggatgcgtggccaggaatccagcacggtggcgacaggatgctgggcaccgtccagtggcatgggcaccaagaacctcctcacccacaccgcagtgcagctgctggctatggcaaccatgctgcatacaactgccatggcggcttggtagcaggcggggccccaatgctctcctctgccgcctttgagctcccgcctggcggatgtgtcgcgggagttgccgccgacagttcatgcgcattaagcttattatcaactcagccatgggacacgacctcccacgaccaccggtccccagcaatgcccgcggccggcgccttcgacggcaccccggtggcgccgtccgtcatggcgagcagctacgcggcgtcgagcgcctggacgggctcgcgggaccccgctgccgacggcgccaggaacgcgcagcgtctcgacgatgctctgcacctggtccacccaggctccgcggcggtccacttctccggcgagctcgagctcgccctgcagggaagcggcgggccgccacacctgccgcgcgtcgaccatggcggctccggcggcggcaccttcaaccattccaccaccagcgcgatgaactggtccctg

SEQ ID NO: 677 - DNA, 1134 bp, Artificial sequence
  miRNA-Resistant target example
atggcgaccggcggcggcagcagcaggagcgacgacgtgcgcgggctcaagtttggcaagaagatctacttcgagcaggacggcgggagcgggagcggggcgggggcggtgggcggcaggaaggggaagggcgtggccaccggtggcgcgaggccggcgtccgccgcctccgcagcccagccgccgaggtgccaggtggacgggtgcggcgtggatctgagcgccgtcaagcagtactactgccggcacaaggtgtgcaacatgcactccaaggagccgcgcgtcttcgtcgccggcatcgagcagcgcttctgccaacagtgcagcaggttccaccagctacatgaatttgaccaagggaaacgtagctgccgccgccgcctcatcggtcacaacgagcgccggaggaagccaccacctggacctctcacttcacgatatggccggctcgctgcatcacttcaagagcctggcaggttcagaagcttcctgctcgacttctcgtacccaagggttccaagcagcgtgagggatgcgtggccaggaatccagcacggtggcgacaggatgctgggcaccgtccagtggcatgggcaccaagaacctcctcacccacaccgcagtgcagctgctggctatggcaaccatgctgcatacaactgccatggcggcttggtagcaggcggggccccaatgctctcctctgccgcctttgagctcccgcctggcggatgtgtcgcgggagttgccgccgactcctcatgcgcattaagcttattatcaactcagccatgggacacgacctcccacgaccaccggtccccagcaatgcccgcggccggcgccttcgacggcaccccggtggcgccgtccgtcatggcgagcagctacgcggcgtcgagcgcctggacgggctcgcgggaccccgctgccgacggcgccaggaacgcgcagcgtctcgacgatgctctgcacctggtccacccaggctccgcggcggtccacttctccggcgagctcgagctcgccctgcagggaagcggcgggccgccacacctgccgcgcgtcgaccatggcggctccggcggcggcaccttcaaccattccaccaccagcgcgatgaactggtccctg

SEQ ID NO: 678 - DNA, 1134 bp, Artificial sequence; identical to SEQ ID NO: 677
  miRNA-Resistant target example

SEQ ID NO: 679 - DNA, 1134 bp, Artificial sequence; identical to SEQ ID NO: 677
  miRNA-Resistant target example

SEQ ID NO: 680 - DNA, 1134 bp, Artificial sequence; identical to SEQ ID NO: 677
  miRNA-Resistant target example

SEQ ID NO: 681 - DNA, 1320 bp, Artificial sequence
  miRNA-Resistant target example
atgggttctttcgggatgaactggaatcagaagaactccatggtgtgggattgggaacatctagtgccatctgtctcgaatgcagttacaaggcatggatctgctaattcatctggtggtactcttacttctagctcagagctagggcatggttcatccaagagctctatttcagcatccattgattcaccatctggagtagggaacagcttagagttcaattttgccgctgttcaaaggcatgttaagaacacgggcaccaatggcagagtcgatgactcagggaattctccatcgtcaatgatagccttcagccaaggagagccactgatcagcctcaagcttggaaaaagggcttacttcgaaaatgtctgtggaggacaggaggccaaggtttctgcaccttcagatgttacttctgcagtcaccgtggtcaagaagactaaggtgtctcagcagaatgcaaagaactggtactgtcaggttgaaggttgcaaagttgacctgtcttctgctaaagattacaaccgcaagcacaaagtctgtgtagctcattctaaagctcccaaggtggttgttgctggtctagagcgccggttttgccaacagtgtagccggtttcatggtttggcggagtttgatcagaacaaacgaagctgtcgtaggcgtcttactcatcataatgcacgaaggaggaagccacaggcagatgcaatttcattcaattcatcacggctctcgtcaatgttttatgatacaagccaccggacaaatcttttctttagtcaacctctctatggccaagtgagaagcaatgcagtatctccgtgggataactcgggaggcttcaaatttatggaaacaaaacatctgtcagtgcagccaacaaaaacagtaggcctggatgagctgcatttctcaaccccccagatatcaactagtgttgtggcgcacactggacatcatcataacttcgataggttcatgccattcaagggaactaacacaaaggttcttaaccaagtttcaggtgtggaagcttcggcgaccgcttccaactctaataacggagccccagaaccaggaagagcattaagcttattatcagacggttcttggggctcaaattcagccgtcatccagcagcctccttctcacgcagatgctggtgcattgccgcccctcgccaccgttgctgtctccaacaccgccgccaggcatcctcttgacccgtccctgggaaggttctggcaagacgatcatcccccactcgacggacctgcacctcagattcaggaactggcgcacctccgaacatgg

SEQ ID NO: 682 - DNA, 1320 bp, Artificial sequence
  miRNA-Resistant target example
atgggttctttcgggatgaactggaatcagaagaactccatggtgtgggattgggaacatctagtgccatctgtctcgaatgcagttacaaggcatggatctgctaattcatctggtggtactcttacttctagctcagagctagggcatggttcatccaagagctctatttcagcatccattgattcaccatctggagtagggaacagcttagagttcaattttgccgctgttcaaaggcatgttaagaacacgggcaccaatggcagagtcgatgactcagggaattctccatcgtcaatgatagccttcagccaaggagagccactgatcagcctcaagcttggaaaaagggcttacttcgaaaatgtctgtggaggacaggaggccaaggtttctgcaccttcagatgttacttctgcagtcaccgtggtcaagaagactaaggtgtctcagcagaatgcaaagaactggtactgtcaggttgaaggttgcaaagttgacctgtcttctgctaaagattacaaccgcaagcacaaagtctgtgtagctcattctaaagctcccaaggtggttgttgctggtctagagcgccggttttgccaacagtgtagccggtttcatggtttggcggagtttgatcagaacaaacgaagctgtcgtaggcgtcttactcatcataatgcacgaaggaggaagccacaggcagatgcaatttcattcaattcatcacggctctcgtcaatgttttatgatacaagccaccggacaaatcttttctttagtcaacctctctatggccaagtgagaagcaatgcagtatctccgtgggataactcgggaggcttcaaatttatggaaacaaaacatctgtcagtgcagccaacaaaaacagtaggcctggatgagctgcatttctcaaccccccagatatcaactagtgttgtggcgcacactggacatcatcataacttcgataggttcatgccattcaagggaactaacacaaaggttcttaaccaagtttcaggtgtggaagcttcggcgaccgcttccaactctaataacggagccccagaacctggaagagcattaagcttattatcagacggttcttggggctcaaattcagccgtcatccagcagcctccttctcacgcagatgctggtgcattgccgcccctcgccaccgttgctgtctccaacaccgccgccaggcatcctcttgacccgtccctgggaaggttctggcaagacgatcatcccccactcgacggacctgcacctcagattcaggaactggcgcacctccgaacatgg

SEQ ID NO: 683 - DNA, 1320 bp, Artificial sequence; identical to SEQ ID NO: 682
  miRNA-Resistant target example

SEQ ID NO: 684 - DNA, 1320 bp, Artificial sequence; identical to SEQ ID NO: 682
  miRNA-Resistant target example

SEQ ID NO: 685 - DNA, 1320 bp, Artificial sequence
  miRNA-Resistant target example
atgggttctttcgggatgaactggaatcagaagaactccatggtgtgggattgggaacatctagtgccatctgtctcgaatgcagttacaaggcatggatctgctaattcatctggtggtactcttacttctagctcagagctagggcatggttcatccaagagctctatttcagcatccattgattcaccatctggagtagggaacagcttagagttcaattttgccgctgttcaaaggcatgttaagaacacgggcaccaatggcagagtcgatgactcagggaattctccatcgtcaatgatagccttcagccaaggagagccactgatcagcctcaagcttggaaaaagggcttacttcgaaaatgtctgtggaggacaggaggccaaggtttctgcaccttcagatgttacttctgcagtcaccgtggtcaagaagactaaggtgtctcagcagaatgcaaagaactggtactgtcaggttgaaggttgcaaagttgacctgtcttctgctaaagattacaaccgcaagcacaaagtctgtgtagctcattctaaagctcccaaggtggttgttgctggtctagagcgccggttttgccaacagtgtagccggtttcatggtttggcggagtttgatcagaacaaacgaagctgtcgtaggcgtcttactcatcataatgcacgaaggaggaagccacaggcagatgcaatttcattcaattcatcacggctctcgtcaatgttttatgatacaagccaccggacaaatcttttctttagtcaacctctctatggccaagtgagaagcaatgcagtatctccgtgggataactcgggaggcttcaaatttatggaaacaaaacatctgtcagtgcagccaacaaaaacagtaggcctggatgagctgcatttctcaaccccccagatatcaactagtgttgtggcgcacactggacatcatcataacttcgataggttcatgccattcaagggaactaacacaaaggttcttaaccaagtttcaggtgtggaagcttcggcgaccgcttccaactctaataacggagccccagaaccagggagagcattaagcttattatcagacggttcttggggctcaaattcagccgtcatccagcagcctccttctcacgcagatgctggtgcattgccgcccctcgccaccgttgctgtctccaacaccgccgccaggcatcctcttgacccgtccctgggaaggttctggcaagacgatcatcccccactcgacggacctgcacctcagattcaggaactggcgcacctccgaacatgg

SEQ ID NO: 686 - DNA, 1149 bp, Artificial sequence
  miRNA-Resistant target example
atggcgaccggcggcggcggtgggagcgacgacttccacgggctcacgttcggccagaagatctacttcgagcaggacgcgggcgccgccggggggagcgcgacgggcggcaggaaggggaagggcgccgcggcgtccgcgagcgccgcccagccgccgcggtgccgggtggacgggtgcggcgtggatctgagcgccgtcaagcagtactactgccggcacaaggtgtgctacatgcactccaaggagccgcgcgtcttcgtcgccggcatcgagcagcgcttctgccagcagtgcagcaggttccaccagttacctgaatttgaccaagggaaacgaagctgccgccgccgcctcattggtcacaacgagcgccggaggaagccaccacctggaccactcacctcacgatacggcccgcttgctgcatcactagttcaagagcctggtaggttcaggagcttcctgctcgacttctcgtacccgagggttccaagcagcgtgagagatgatgcgtggcaatggcaagggatgcagcatggcggcgacaggatgctgctgggtaccgccagcgccatccagtggcatgggaaccaagaacctcacccaccacatcgcagcgcagctgcgggctatggcaaccatgcgtacaacaactgccatggtggcggcggcttggtagcagcagcagcgggggcgtcaatgctctcctctgccttcgagcccccgcctggcggtggcggatgtgtcgcaggagctaccgcggccgacagttcatgcgcattaagcttattatcaactcagccatgggatacgcccacccaaagtggcagcagccaccacaaccggtccccagcgatgtccgcggctgcaggcgccttcgaagtggcgccgtcgtccgtcgtggcgagcagctacacggcgtcgagctcctggtctggctcacgggaccctgccgacggcgccaggaaaaacgcgcagcgtcacgatgatggcctgcacctggtccatccaccaggccccgtccaccacggccacttctccggcgagctcgagctcgccctgcagggaagcggcccgccgcatgtcgaccatggcggcggcacctgcttcagccattctgacaccaacgcgatgaattggtccctg

SEQ ID NO: 687 - DNA, 1149 bp, Artificial sequence
  miRNA-Resistant target example
atggcgaccggcggcggcggtgggagcgacgacttccacgggctcacgttcggccagaagatctacttcgagcaggacgcgggcgccgccggggggagcgcgacgggcggcaggaaggggaagggcgccgcggcgtccgcgagcgccgcccagccgccgcggtgccgggtggacgggtgcggcgtggatctgagcgccgtcaagcagtactactgccggcacaaggtgtgctacatgcactccaaggagccgcgcgtcttcgtcgccggcatcgagcagcgcttctgccagcagtgcagcaggttccaccagttacctgaatttgaccaagggaaacgaagctgccgccgccgcctcattggtcacaacgagcgccggaggaagccaccacctggaccactcacctcacgatacggcccgcttgctgcatcactagttcaagagcctggtaggttcaggagcttcctgctcgacttctcgtacccgagggttccaagcagcgtgagagatgatgcgtggcaatggcaagggatgcagcatggcggcgacaggatgctgctgggtaccgccagcgccatccagtggcatgggaaccaagaacctcacccaccacatcgcagcgcagctgcgggctatggcaaccatgcgtacaacaactgccatggtggcggcggcttggtagcagcagcagcgggggcgtcaatgctctcctctgccttcgagcccccgcctggcggtggcggatgtgtcgcaggagctaccgcggccgactcctcatgcgcattaagcttattatcaactcagccatgggatacgcccacccaaagtggcagcagccaccacaaccggtccccagcgatgtccgcggctgcaggcgccttcgaagtggcgccgtcgtccgtcgtggcgagcagctacacggcgtcgagctcctggtctggctcacgggaccctgccgacggcgccaggaaaaacgcgcagcgtcacgatgatggcctgcacctggtccatccaccaggccccgtccaccacggccacttctccggcgagctcgagctcgccctgcagggaagcggcccgccgcatgtcgaccatggcggcggcacctgcttcagccattctgacaccaacgcgatgaattggtccctg

SEQ ID NO: 688 - DNA, 1149 bp, Artificial sequence; identical to SEQ ID NO: 687
  miRNA-Resistant target example

SEQ ID NO: 689 - DNA, 1149 bp, Artificial sequence; identical to SEQ ID NO: 687
  miRNA-Resistant target example

SEQ ID NO: 690 - DNA, 1149 bp, Artificial sequence; identical to SEQ ID NO: 687
  miRNA-Resistant target example

SEQ ID NO: 691 - DNA, 987 bp, Artificial sequence
  miRNA-Resistant target example
ccctcgacggcgcccgcgcccgcccgctgccaggtcgacggctgcaacgttgacctcaccgacgtcaagcccgcctactactgccgccacaaggtgtgcaaaatgcactccaaggagccccgcgtcctcgtcaacggcctcgagcagcgcttctgccagcagtgcagcaggttccaccagctgcctgaattcgaccagctaaagaagagctgccgcaaacgcctcgcaggccacaacgagcgccggaggaggccgccgcctggaccccttgcgtcacgatacggccgtcacgctgcgtcgctcggcgagcccggcaggctcagaagcttcatgctggatttctcgtacccgagggtctcaagcgccatgaggggtgggtttccggcggtgaggcccggtggtgaaagggtgcctggcggtatccagtggcaagcgggcttggatcctcgtcaccaccaaggcgcggtcgcgggatacggcgcccactatgggagcgagggtggtagctcgtcgtcggcgaggccgccggtgttccctggcccggagctgcccccaggtggatgccttgcaggagtccccgcggacagttcatgcgcattaagcttattatcaactcagccatgggatgctgcccacagccacagccacagccacgctgcgccaacagcgggtttcgacggcggcagccctgtggcgccctccctcatggcggcgagtagctacatcgcgccgagcccctggaccgagaccgactcctggggccacgaaggcgggcggagcgtgcctcagctgccacctgacgacgtccccctcggcgaggtgcactccggctcgagcagccaccacggccagttctcaggtgagctcgagctcgccctgcagggaaacaggccagcgccagggtcggcggcaccgccagcgccgcgcaataatcagggctccgcgggcacgttcgaccaggctggcaacacgatggactggtcgctc

SEQ ID NO: 692 - DNA, 987 bp, Artificial sequence
  miRNA-Resistant target example
ccctcgacggcgcccgcgcccgcccgctgccaggtcgacggctgcaacgttgacctcaccgacgtcaagcccgcctactactgccgccacaaggtgtgcaaaatgcactccaaggagccccgcgtcctcgtcaacggcctcgagcagcgcttctgccagcagtgcagcaggttccaccagctgcctgaattcgaccagctaaagaagagctgccgcaaacgcctcgcaggccacaacgagcgccggaggaggccgccgcctggaccccttgcgtcacgatacggccgtcacgctgcgtcgctcggcgagcccggcaggctcagaagcttcatgctggatttctcgtacccgagggtctcaagcgccatgaggggtgggtttccggcggtgaggcccggtggtgaaagggtgcctggcggtatccagtggcaagcgggcttggatcctcgtcaccaccaaggcgcggtcgcgggatacggcgcccactatgggagcgagggtggtagctcgtcgtcggcgaggccgccggtgttccctggcccggagctgcccccaggtggatgccttgcaggagtccccgcggactcctcatgcgcattaagcttattatcaactcagccatgggatgctgcccacagccacagccacagccacgctgcgccaacagcgggtttcgacggcggcagccctgtggcgccctccctcatggcggcgagtagctacatcgcgccgagcccctggaccgagaccgactcctggggccacgaaggcgggcggagcgtgcctcagctgccacctgacgacgtccccctcggcgaggtgcactccggctcgagcagccaccacggccagttctcaggtgagctcgagctcgccctgcagggaaacaggccagcgccagggtcggcggcaccgccagcgccgcgcaataatcagggctccgcgggcacgttcgaccaggctggcaacacgatggactggtcgctc

SEQ ID NO: 693 - DNA, 987 bp, Artificial sequence; identical to SEQ ID NO: 692
  miRNA-Resistant target example

SEQ ID NO: 694 - DNA, 987 bp, Artificial sequence; identical to SEQ ID NO: 692
  miRNA-Resistant target example

SEQ ID NO: 695 - DNA, 987 bp, Artificial sequence; identical to SEQ ID NO: 692
  miRNA-Resistant target example

SEQ ID NO: 696 - DNA, 1467 bp, Artificial sequence
  miRNA-Resistant target example
atggcgacacaggccgctttcctcgcagggttctcgcagctcgccgcgcagccgggccgcgaccgcgccgtggcggtggcggtggcgccggcgccgggcccggcccgggtggccgttgcggcggtgggtagcgccaagttgggcgtgaaggcggggacgtccaggaccgcggcggtggcgcgcctcggggtgcggtgccgggccagcctgatcgagcccgacggcgggcggctggtggacctggtggcgcccgaggagggcgggcggcgcgcggcgctgcggcgggaggcggcggagctgccgcaccggctgcgcttgggccgcgtcgacaaggaatgggtccacgtcctcagcgaagggtgggcgagcccgctgcaagggttcatgcgcgagcatgaatttttacaggccttacacttcaatgccatccgcggccaggatggcaggatggtcaacatgtccgtccccatcgtgctctctgtcggggacgcacagcgaagggccatccaggccgacggcgccacgcgcgtcgcgctcgttgacgagcgcgaccgccccatcgccgtcctcagcgacattgagatctataagcataataaggaagaaagggtagcacggacatgggggacaactgcacctggattaccttatgtcgaggaggcaattaccaatgctggtgactggttggttggtggggacttggaggttatagaaccaatcaagtacaacgatggtctagatcagtatcgcctgtctccagcacagctgcgtgaagagtttgccaggcgcaatgctgatgcagtatttgcctttcagcttcgcaatcctgtacacaatgggcatgctcttcttatgaccgacacacgcaaacgtctccttgagatgggttataaaaaccctgttcttctgctccatccactgggaggattcacaaaagcagatgatgtgcctcttagttggagaatgaagcaacatgagaaggttcttgaggaaggtgtcctcaacccagaatcaactgttgttgcgatctttccctctccaatgcattatgctgggccaactgaggtgcagtggcatgctaaggctcgtattaatgctggtgcaaatttctatattgttggaagggatcctgctggtatgagccatcccacggagaaaagggacctctatgatgctgaccacgggaagaaggttttgagcatggctcctggcctcgagaggctcaacatccttcctttcaaggtggctgcatatgacacaaagcaaaagaaaatggatttcttcgatccatcaaggaaagatgatttcctcttcatctctggcacaaagatgcgcactcttgccaagaaccgcgagagtcccccggatggttttatgtgcccgggtggctggaaagtgctcgttgaatactatgacagcttggtgccatccgagggcagcagcaagctgcgcgagccagttgcagcc

SEQ ID NO: 697 - DNA, 1467 bp, Artificial sequence
  miRNA-Resistant target example
atggcgacacaggccgctttcctcgcagggttctcgcagctcgccgcgcagccgggccgcgaccgcgccgtggcggtggcggtggcgccggcgccgggcccggcccgggtggccgttgcggcggtgggtagcgccaagttgggcgtgaaggcggggacgtccaggaccgcggcggtggcgcgcctcggggtgcggtgccgggccagcctgatcgagcccgacggcgggcggctggtggacctggtggcgcccgaggagggcgggcggcgcgcggcgctgcggcgggaggcggcggagctgccgcaccggctgcgcttgggccgcgtcgacaaggaatgggtccacgtcctcagcgaagggtgggcgagcccgctgcaagggttcatgcgcgagcatgagtttttacaggccttacacttcaatgccatccgcggccaggatggcaggatggtcaacatgtccgtccccatcgtgctctctgtcggggacgcacagcgaagggccatccaggccgacggcgccacgcgcgtcgcgctcgttgacgagcgcgaccgccccatcgccgtcctcagcgacattgagatctataagcataataaggaagaaagggtagcacggacatgggggacaactgcacctggattaccttatgtcgaggaggcaattaccaatgctggtgactggttggttggtggggacttggaggttatagaaccaatcaagtacaacgatggtctagatcagtatcgcctgtctccagcacagctgcgtgaagagtttgccaggcgcaatgctgatgcagtatttgcctttcagcttcgcaatcctgtacacaatgggcatgctcttcttatgaccgacacacgcaaacgtctccttgagatgggttataaaaaccctgttcttctgctccatccactgggaggattcacaaaagcagatgatgtgcctcttagttggagaatgaagcaacatgagaaggttcttgaggaaggtgtcctcaacccagaatcaactgttgttgcgatctttccctctccaatgcattatgctgggccaactgaggtgcagtggcatgctaaggctcgtattaatgctggtgcaaatttctatattgttggaagggatcctgctggtatgagccatcccacggagaaaagggacctctatgatgctgaccacgggaagaaggttttgagcatggctcctggcctcgagaggctcaacatccttcctttcaaggtggctgcatatgacacaaagcaaaagaaaatggatttcttcgatccatcaaggaaagatgatttcctcttcatctctggcacaaagatgcgcactcttgccaagaaccgcgagagtcccccggatggttttatgtgcccgggtggctggaaagtgctcgttgaatactatgacagcttggtgccatccgagggcagcagcaagctgcgcgagccagttgcagcc

SEQ ID NO: 698 - DNA, 1467 bp, Artificial sequence
  miRNA-Resistant target example
atggcgacacaggccgctttcctcgcagggttctcgcagctcgccgcgcagccgggccgcgaccgcgccgtggcggtggcggtggcgccggcgccgggcccggcccgggtggccgttgcggcggtgggtagcgccaagttgggcgtgaaggcggggacgtccaggaccgcggcggtggcgcgcctcggggtgcggtgccgggccagcctgatcgagcccgacggcgggcggctggtggacctggtggcgcccgaggagggcgggcggcgcgcggcgctgcggcgggaggcggcggagctgccgcaccggctgcgcttgggccgcgtcgacaaggaatgggtccacgtcctcagcgaagggtgggcgagcccgctgcaagggttcatgcgcgagcatgaattcttacaggccttacacttcaatgccatccgcggccaggatggcaggatggtcaacatgtccgtccccatcgtgctctctgtcggggacgcacagcgaagggccatccaggccgacggcgccacgcgcgtcgcgctcgttgacgagcgcgaccgccccatcgccgtcctcagcgacattgagatctataagcataataaggaagaaagggtagcacggacatgggggacaactgcacctggattaccttatgtcgaggaggcaattaccaatgctggtgactggttggttggtggggacttggaggttatagaaccaatcaagtacaacgatggtctagatcagtatcgcctgtctccagcacagctgcgtgaagagtttgccaggcgcaatgctgatgcagtatttgcctttcagcttcgcaatcctgtacacaatgggcatgctcttcttatgaccgacacacgcaaacgtctccttgagatgggttataaaaaccctgttcttctgctccatccactgggaggattcacaaaagcagatgatgtgcctcttagttggagaatgaagcaacatgagaaggttcttgaggaaggtgtcctcaacccagaatcaactgttgttgcgatctttccctctccaatgcattatgctgggccaactgaggtgcagtggcatgctaaggctcgtattaatgctggtgcaaatttctatattgttggaagggatcctgctggtatgagccatcccacggagaaaagggacctctatgatgctgaccacgggaagaaggttttgagcatggctcctggcctcgagaggctcaacatccttcctttcaaggtggctgcatatgacacaaagcaaaagaaaatggatttcttcgatccatcaaggaaagatgatttcctcttcatctctggcacaaagatgcgcactcttgccaagaaccgcgagagtcccccggatggttttatgtgcccgggtggctggaaagtgctcgttgaatactatgacagcttggtgccatccgagggcagcagcaagctgcgcgagccagttgcagcc

SEQ ID NO: 699 - DNA, 1467 bp, Artificial sequence
  miRNA-Resistant target example
atggcgacacaggccgctttcctcgcagggttctcgcagctcgccgcgcagccgggccgcgaccgcgccgtggcggtggcggtggcgccggcgccgggcccggcccgggtggccgttgcggcggtgggtagcgccaagttgggcgtgaaggcggggacgtccaggaccgcggcggtggcgcgcctcggggtgcggtgccgggccagcctgatcgagcccgacggcgggcggctggtggacctggtggcgcccgaggagggcgggcggcgcgcggcgctgcggcgggaggcggcggagctgccgcaccggctgcgcttgggccgcgtcgacaaggaatgggtccacgtcctcagcgaagggtgggcgagcccgctgcaagggttcatgcgcgagcatgaatttctccaggccctccacttcaatgccatccgcggccaggatggcaggatggtcaacatgtccgtccccatcgtgctctctgtcggggacgcacagcgaagggccatccaggccgacggcgccacgcgcgtcgcgctcgttgacgagcgcgaccgccccatcgccgtcctcagcgacattgagatctataagcataataaggaagaaagggtagcacggacatgggggacaactgcacctggattaccttatgtcgaggaggcaattaccaatgctggtgactggttggttggtggggacttggaggttatagaaccaatcaagtacaacgatggtctagatcagtatcgcctgtctccagcacagctgcgtgaagagtttgccaggcgcaatgctgatgcagtatttgcctttcagcttcgcaatcctgtacacaatgggcatgctcttcttatgaccgacacacgcaaacgtctccttgagatgggttataaaaaccctgttcttctgctccatccactgggaggattcacaaaagcagatgatgtgcctcttagttggagaatgaagcaacatgagaaggttcttgaggaaggtgtcctcaacccagaatcaactgttgttgcgatctttccctctccaatgcattatgctgggccaactgaggtgcagtggcatgctaaggctcgtattaatgctggtgcaaatttctatattgttggaagggatcctgctggtatgagccatcccacggagaaaagggacctctatgatgctgaccacgggaagaaggttttgagcatggctcctggcctcgagaggctcaacatccttcctttcaaggtggctgcatatgacacaaagcaaaagaaaatggatttcttcgatccatcaaggaaagatgatttcctcttcatctctggcacaaagatgcgcactcttgccaagaaccgcgagagtcccccggatggttttatgtgcccgggtggctggaaagtgctcgttgaatactatgacagcttggtgccatccgagggcagcagcaagctgcgcgagccagttgcagcc

SEQ ID NO: 700 - DNA, 1467 bp, Artificial sequence
  miRNA-Resistant target example
atggcgacacaggccgctttcctcgcagggttctcgcagctcgccgcgcagccgggccgcgaccgcgccgtggcggtggcggtggcgccggcgccgggcccggcccgggtggccgttgcggcggtgggtagcgccaagttgggcgtgaaggcggggacgtccaggaccgcggcggtggcgcgcctcggggtgcggtgccgggccagcctgatcgagcccgacggcgggcggctggtggacctggtggcgcccgaggagggcgggcggcgcgcggcgctgcggcgggaggcggcggagctgccgcaccggctgcgcttgggccgcgtcgacaaggaatgggtccacgtcctcagcgaagggtgggcgagcccgctgcaagggttcatgcgcgagcatgaatttttacaagccttacacttcaatgccatccgcggccaggatggcaggatggtcaacatgtccgtccccatcgtgctctctgtcggggacgcacagcgaagggccatccaggccgacggcgccacgcgcgtcgcgctcgttgacgagcgcgaccgccccatcgccgtcctcagcgacattgagatctataagcataataaggaagaaagggtagcacggacatgggggacaactgcacctggattaccttatgtcgaggaggcaattaccaatgctggtgactggttggttggtggggacttggaggttatagaaccaatcaagtacaacgatggtctagatcagtatcgcctgtctccagcacagctgcgtgaagagtttgccaggcgcaatgctgatgcagtatttgcctttcagcttcgcaatcctgtacacaatgggcatgctcttcttatgaccgacacacgcaaacgtctccttgagatgggttataaaaaccctgttcttctgctccatccactgggaggattcacaaaagcagatgatgtgcctcttagttggagaatgaagcaacatgagaaggttcttgaggaaggtgtcctcaacccagaatcaactgttgttgcgatctttccctctccaatgcattatgctgggccaactgaggtgcagtggcatgctaaggctcgtattaatgctggtgcaaatttctatattgttggaagggatcctgctggtatgagccatcccacggagaaaagggacctctatgatgctgaccacgggaagaaggttttgagcatggctcctggcctcgagaggctcaacatccttcctttcaaggtggctgcatatgacacaaagcaaaagaaaatggatttcttcgatccatcaaggaaagatgatttcctcttcatctctggcacaaagatgcgcactcttgccaagaaccgcgagagtcccccggatggttttatgtgcccgggtggctggaaagtgctcgttgaatactatgacagcttggtgccatccgagggcagcagcaagctgcgcgagccagttgcagcc

SEQ ID NO: 701 - DNA, 1485 bp, Artificial sequence
  miRNA-Resistant target example
atgggtacggcggctgtcgtggaggacacgatacgcgtcgtcctcacctgcctccctgatccgcccttccgcaccaccggttcctcccgtccctaccagagtcccagcggcggcggcggcggcggggaccgcatcagccgcctctcagacgcggtgctctctaacatcgtggcgcgtctccccgccaaggacgcagcgcgcactaccgcgctctccaggcgctggcgccgcgtctgggcctccactccactcgtcctcgacgactccgacctcctcgtcttccacgacgacggcggctgctctacgcccaactggttagccgtcacagacaccgtgtcccacgtcctctcctcccacagggggcccatccgctttgtgcgcctcacctgctgctacatggcgctggcctcgcacaacggcgcgctccagtactggctccgggtcctcgctgcggggggagtcgaggatctcgtcctcgtcaaccgcccattacccacctccgtgggcctcccaatagatgtattacatttagcaagtctccgcaccctctacctcggtttctggtgcttcccggacaccgccaccctcccgcgaggccgcgccaccgtgttcccctgcctccaggagattggactctgcgctaccgtcatccacgccagggacatcgaccacctgctcgcctgcagccccgtgctcgagaagttcgccagcatcaccagcatctacttcacagaccctgtccggatccgcagctgcagcctccggtgccttgtcttctgggagtccctggccaatgagctcgacttggtcgtcgccccgcgcctccagcgcctaatcctgtggcagtcgcgccaatggatgatcggctccgtccatttccgcagcaggatcaggattggctccgccaccgaactcaaggtgctcggctacctggagccaagcatccaccagctcgagattggcggcaccataattgatagtggaacaaagatgaccccatctaacatggttccaagtgtcaagatcttggccttgaagatgcagttcagaatccgcaaggaagtcaagatgctgcccaccttcctgagatgctttcccaatgtggagacattgcatgttctgtcacatgaaactgatgagcaaaatggcaagttcaatttgaagttctgggaggaggttggctccatcagctgcctagagacacgcatcaccaaggtggtgtttgacagattcagaggagagcgttgtgagctcgcgttcctcaagttcgtcctagagagggcagaatcgctgctgaagcttgtggttgtattggccaatggagatcaagcctcagtggatgagatgcttgctaagttgaagtctctgaccacggtgaaacgagccagcgatttccctactctgttggcagttgcccgtgagggtgacagcgcctggtactttgagagagcatccgatctttctgttactgaccccttcgatttg

SEQ ID NO: 702 - DNA, 1485 bp, Artificial sequence
  miRNA-Resistant target example
atgggtacggcggctgtcgtggaggacacgatacgcgtcgtcctcacctgcctccctgatccgcccttccgcaccaccggttcctcccgtccctaccagagtcccagcggcggcggcggcggcggggaccgcatcagccgcctctcagacgcggtgctctctaacatcgtggcgcgtctccccgccaaggacgcagcgcgcactaccgcgctctccaggcgctggcgccgcgtctgggcctccactccactcgtcctcgacgactccgacctcctcgtcttccacgacgacggcggctgctctacgcccaactggttagccgtcacagacaccgtgtcccacgtcctctcctcccacagggggcccatccgctttgtgcgcctcacctgctgctacatggcgctggcctcgcacaacggcgcgctccagtactggctccgggtcctcgctgcggggggagtcgaggatctcgtcctcgtcaaccgcccattacccacctccgtgggcctccccatagatgtattacatttagcaagtctccgcaccctctacctcggtttctggtgcttcccggacaccgccaccctcccgcgaggccgcgccaccgtgttcccctgcctccaggagattggactctgcgctaccgtcatccacgccagggacatcgaccacctgctcgcctgcagccccgtgctcgagaagttcgccagcatcaccagcatctacttcacagaccctgtccggatccgcagctgcagcctccggtgccttgtcttctgggagtccctggccaatgagctcgacttggtcgtcgccccgcgcctccagcgcctaatcctgtggcagtcgcgccaatggatgatcggctccgtccatttccgcagcaggatcaggattggctccgccaccgaactcaaggtgctcggctacctggagccaagcatccaccagctcgagattggcggcaccataattgatagtggaacaaagatgaccccatctaacatggttccaagtgtcaagatcttggccttgaagatgcagttcagaatccgcaaggaagtcaagatgctgcccaccttcctgagatgctttcccaatgtggagacattgcatgttctgtcacatgaaactgatgagcaaaatggcaagttcaatttgaagttctgggaggaggttggctccatcagctgcctagagacacgcatcaccaaggtggtgtttgacagattcagaggagagcgttgtgagctcgcgttcctcaagttcgtcctagagagggcagaatcgctgctgaagcttgtggttgtattggccaatggagatcaagcctcagtggatgagatgcttgctaagttgaagtctctgaccacggtgaaacgagccagcgatttccctactctgttggcagttgcccgtgagggtgacagcgcctggtactttgagagagcatccgatctttctgttactgaccccttcgatttg

SEQ ID NO: 703 - DNA, 1485 bp, Artificial sequence; identical to SEQ ID NO: 702
  miRNA-Resistant target example

SEQ ID NO: 704 - DNA, 1485 bp, Artificial sequence; identical to SEQ ID NO: 702
  miRNA-Resistant target example

SEQ ID NO: 705 - DNA, 1485 bp, Artificial sequence
  miRNA-Resistant target example
atgggtacggcggctgtcgtggaggacacgatacgcgtcgtcctcacctgcctccctgatccgcccttccgcaccaccggttcctcccgtccctaccagagtcccagcggcggcggcggcggcggggaccgcatcagccgcctctcagacgcggtgctctctaacatcgtggcgcgtctccccgccaaggacgcagcgcgcactaccgcgctctccaggcgctggcgccgcgtctgggcctccactccactcgtcctcgacgactccgacctcctcgtcttccacgacgacggcggctgctctacgcccaactggttagccgtcacagacaccgtgtcccacgtcctctcctcccacagggggcccatccgctttgtgcgcctcacctgctgctacatggcgctggcctcgcacaacggcgcgctccagtactggctccgggtcctcgctgcggggggagtcgaggatctcgtcctcgtcaaccgcccattacccacctccgtgggcctcccaatcgatgtattacatttagcaagtctccgcaccctctacctcggtttctggtgcttcccggacaccgccaccctcccgcgaggccgcgccaccgtgttcccctgcctccaggagattggactctgcgctaccgtcatccacgccagggacatcgaccacctgctcgcctgcagccccgtgctcgagaagttcgccagcatcaccagcatctacttcacagaccctgtccggatccgcagctgcagcctccggtgccttgtcttctgggagtccctggccaatgagctcgacttggtcgtcgccccgcgcctccagcgcctaatcctgtggcagtcgcgccaatggatgatcggctccgtccatttccgcagcaggatcaggattggctccgccaccgaactcaaggtgctcggctacctggagccaagcatccaccagctcgagattggcggcaccataattgatagtggaacaaagatgaccccatctaacatggttccaagtgtcaagatcttggccttgaagatgcagttcagaatccgcaaggaagtcaagatgctgcccaccttcctgagatgctttcccaatgtggagacattgcatgttctgtcacatgaaactgatgagcaaaatggcaagttcaatttgaagttctgggaggaggttggctccatcagctgcctagagacacgcatcaccaaggtggtgtttgacagattcagaggagagcgttgtgagctcgcgttcctcaagttcgtcctagagagggcagaatcgctgctgaagcttgtggttgtattggccaatggagatcaagcctcagtggatgagatgcttgctaagttgaagtctctgaccacggtgaaacgagccagcgatttccctactctgttggcagttgcccgtgagggtgacagcgcctggtactttgagagagcatccgatctttctgttactgaccccttcgatttg

SEQ ID NO: 706 - DNA, 1467 bp, Artificial sequence; identical to SEQ ID NO: 696
  miRNA-Resistant target example

SEQ ID NO: 707 - DNA, 1467 bp, Artificial sequence; identical to SEQ ID NO: 697
  miRNA-Resistant target example

SEQ ID NO: 708 - DNA, 1467 bp, Artificial sequence; identical to SEQ ID NO: 698
  miRNA-Resistant target example

SEQ ID NO: 709 - DNA, 1467 bp, Artificial sequence; identical to SEQ ID NO: 699
  miRNA-Resistant target example

SEQ ID NO: 710 - DNA, 1467 bp, Artificial sequence; identical to SEQ ID NO: 700
  miRNA-Resistant target example

SEQ ID NO: 711 - DNA, 261 bp, Artificial sequence
  miRNA-Resistant target example
atggcaacggcgtttgtcccgtccgtctctgcgatggccaccgccgctgccgctccaacgtctgtggcgccgtcccctgcgccaaaggccaacaacagcaggaaggcggcggtgcctgggatgactgggtacgagctgctcaagagagtaaaagaaagcgcagcactcagtgacatcctcgtcgtcatcatgtcgtcggagaacgtgcccaaccgcatcacccgctgcttggaggagctcgacccgcgcctcgctgtaatt

SEQ ID NO: 712 - DNA, 261 bp, Artificial sequence
  miRNA-Resistant target example
atggcaacggcgtttgtcccgtccgtctctgcgatggccaccgccgctgccgctccaacgtctgtggcgccgtcccctgcgccaaaggccaacaacagcaggaaggcggcggtgcctgggatgactgggtacgagctgctcaagcgcgtaaacgcaagcgcagcactcagtgacatcctcgtcgtcatcatgtcgtcggagaacgtgcccaaccgcatcacccgctgcttggaggagctcgacccgcgcctcgctgtaatt

SEQ ID NO: 713 - DNA, 261 bp, Artificial sequence; identical to SEQ ID NO: 712
  miRNA-Resistant target example

SEQ ID NO: 714 - DNA, 261 bp, Artificial sequence; identical to SEQ ID NO: 712
  miRNA-Resistant target example

SEQ ID NO: 715 - DNA, 261 bp, Artificial sequence; identical to SEQ ID NO: 712
  miRNA-Resistant target example

SEQ ID NO: 716 - DNA, 741 bp, Artificial sequence
  miRNA-Resistant target example
atggatgttttcaccaagcaactcctccccatgcctcaccagcgggaccccaactacccttcctctagtacaagcagtagtagcagcagctcctcctccacgcccccatctcgccctcaccaccgtgcgcaaccccagccccacaacctcccccagtcccccagacccgtcccgcgcaccatcgacaccaccccgttccccaccaccttcgtccaggccgacaccacctcgttcaagcaggtcgtccagatgctcaccggcgccgagcagccggccaacaacgacgcgacgacggcgggcgcagccgctgccgctgccgccaacggcggtggcgccggcgcccaggcggccagcggtggaccgtgctgccggcccaagaagccgtcgttcaagctgtacgagcggcggagcagcctgaagaacctgaagatgatcgcgccgctggcgatgggctcgccgccgtcgccgtcgccgcggagggcggcgccggagatcctgtcgccgagcgtgctggacttcccgtccctcacgctcagcccggtgacgccgctcgccggcgacccctttaaccgctcgccggcgtcggcgtcgtcctccgaggaggccgagcgcgcggccatcgccgagaggggcttcttcctccacccgtccccgaggggcgccgagcccccgcgcctgctcccgctcttccccgtcgtctcgccccggatggccggcgccgcggcggcgccgtcgtccgag

SEQ ID NO: 717 - DNA, 741 bp, Artificial sequence
  miRNA-Resistant target example
atggatgttttcaccaagcaactcctccccatgcctcaccagcgggaccccaactacccttcctcttccacaagctcctccagcagcagctcctcctccacgcccccatctcgccctcaccaccgtgcgcaaccccagccccacaacctcccccagtcccccagacccgtcccgcgcaccatcgacaccaccccgttccccaccaccttcgtccaggccgacaccacctcgttcaagcaggtcgtccagatgctcaccggcgccgagcagccggccaacaacgacgcgacgacggcgggcgcagccgctgccgctgccgccaacggcggtggcgccggcgcccaggcggccagcggtggaccgtgctgccggcccaagaagccgtcgttcaagctgtacgagcggcggagcagcctgaagaacctgaagatgatcgcgccgctggcgatgggctcgccgccgtcgccgtcgccgcggagggcggcgccggagatcctgtcgccgagcgtgctggacttcccgtccctcacgctcagcccggtgacgccgctcgccggcgacccctttaaccgctcgccggcgtcggcgtcgtcctccgaggaggccgagcgcgcggccatcgccgagaggggcttcttcctccacccgtccccgaggggcgccgagcccccgcgcctgctcccgctcttccccgtcgtctcgccccggatggccggcgccgcggcggcgccgtcgtccgag

SEQ ID NO: 718 - DNA, 741 bp, Artificial sequence; identical to SEQ ID NO: 717
  miRNA-Resistant target example

SEQ ID NO: 719 - DNA, 741 bp, Artificial sequence; identical to SEQ ID NO: 717
  miRNA-Resistant target example

SEQ ID NO: 720 - DNA, 741 bp, Artificial sequence; identical to SEQ ID NO: 717
  miRNA-Resistant target example

SEQ ID NO: 721 - DNA, 507 bp, Artificial sequence
  miRNA-Resistant target example
cgccgattccgcgtgcgccaactgttccgagagcgatggcacgaggaccgccattgccatggccggtggccccgtcctctctcggagtcttgtgtcctttacctccgcaggaatctctgtcctttcgcgatgtaaaaaattaccgtcgctgttaatttgtttactgactccctgtactgggtttcctgggctgcagctgggtgggaggagcaacgccacgtcgtcggcgaaggcgaagcaggagcaccgcgaggactgccacctcatgggcctgacatggctgctgaaccggaaccccacgcggtaccgcgaggcggccacggcggtcatccaggcgctcatggcggccgacgaggccggcgcgggccacccggccacctgctcgctccccgccgacgatgagctaccagtggccgttgcctcctcgcagattaacggcgccacgtccgcatcgatgtcttaagaccctggcaaagcgcaagcggtggtcctcgctgctgccgtcat

SEQ ID NO: 722 - DNA, 507 bp, Artificial sequence
  miRNA-Resistant target example
cgccgattccgcgtgcgccaactgttccgagagcgatggcacgaggaccgccattgccatggccggtggccccgtcctctctcggagtcttgtgtcctttacctccgcaggaatctctgtcctttcgcgatgtaaaaaattaccgtcgctgttaatttgtttactgactccctgtactgggtttcctgggctgcagctgggtgggaggagcaacgccacgtcgtcggcgaaggcgaagcaggagcaccgcgaggactgccacctcatgggcctgacatggctgctgaaccggaaccccacgcggtaccgcgaggcggccacggcggtcatccaggcgctcatggcggccgacgaggccggcgcgggccacccggccacctgctcgctccccgccgacgatgagctaccagtggccgttgcctcctcgcagattaacggcgccacgtccgcatcgatgtcctcagaccctggcaaagcgcaagcggtggtcctcgctgctgccgtcat

SEQ ID NO: 723 - DNA, 507 bp, Artificial sequence; identical to SEQ ID NO: 722
  miRNA-Resistant target example

SEQ ID NO: 724 - DNA, 507 bp, Artificial sequence; identical to SEQ ID NO: 722
  miRNA-Resistant target example

SEQ ID NO: 725 - DNA, 507 bp, Artificial sequence; identical to SEQ ID NO: 722
  miRNA-Resistant target example

SEQ ID NO: 726 - DNA, 981 bp, Artificial sequence
  miRNA-Resistant target example
atgccgaggccgcccacaatggtgatccaggacgactacatcgacatggacctgaccccggcagccacaccggagccctcgccagcctcgccccgcttcgagttccagagcgccggcgccggcgccgccggcgacaggcatagggaggcggcgttcgcgtcccccgcggacgagctgttctacaagggcaacctgctgccgctccacctgccgccgcggctgcagctcgtgcagaggctcctccaggaccaggagcagccgccgccgctgcgaggggcgaagcgggatgcggagtcggatgccacggcggcggcggcggcagagcgaggagacgccgacgctgccgctgccgccagcaaggtgtgcgccgccaagaagccgtcttgggccaagaagctcaaggtggttaagcggtgggcgtcgaaggagtacatccggtcgctcttcctggccaggccgccgttgccgagcgacatcgtcgccgccgccggtggcgccagcgccagcggccacggcatcggcagcgtcagcgcgagggggagcgtcctagagcaggaggaggtgtgccagtgccagcaccgcaagtccttctccggcatcatccgccgggtgcgcctcgtggcgaccaaggcgcctgggacctcgccgctgtgctcctcctcgtcctcgtcctcctcgtcgtccacgccgtcgtgccgcaacgccaatggatttttttttagaacaccggcgtcggcggcgggggcgacgccggcgctgaagcggagcagcagcgccgggtcgtccgaggagggcgccatccagggcgccatcgcgcactgcaagcgttcccagctgctgcagcccgggatggtggcctcggcggcggcgcggaggagcgtcagcgacgtcatgttctactcggtgaccaacacgcccagagcctcttccgtgaccgccggcgaggtggcgcaggagaggaggcaggagatgtgcaggggc

SEQ ID NO: 727 - DNA, 981 bp, Artificial sequence
  miRNA-Resistant target example
atgccgaggccgcccacaatggtgatccaggacgactacatcgacatggacctgaccccggcagccacaccggagccctcgccagcctcgccccgcttcgagttccagagcgccggcgccggcgccgccggcgacaggcatagggaggcggcgttcgcgtcccccgcggacgagctgttctacaagggcaacctgctgccgctccacctgccgccgcggctgcagctcgtgcagaggctcctccaggaccaggagcagccgccgccgctgcgaggggcgaagcgggatgcggagtcggatgccacggcggcggcggcggcagagcgaggagacgccgacgctgccgctgccgccagcaaggtgtgcgccgccaagaagccgtcttgggccaagaagctcaaggtggttaagcggtgggcgtcgaaggagtacatccggtcgctcttcctggccaggccgccgttgccgagcgacatcgtcgccgccgccggtggcgccagcgccagcggccacggcatcggcagcgtcagcgcgagggggagcgtcctagagcaggaggaggtgtgccagtgccagcaccgcaagtccttctccggcatcatccgccgggtgcgcctcgtggcgaccaaggcgcctgggacctcgccgctgtgctcctcctcgtcctcgtcctcctcgtcgtccacgccgtcgtgccgcaacgcaaatggatttttttttagaacaccggcgtcggcggcgggggcgacgccggcgctgaagcggagcagcagcgccgggtcgtccgaggagggcgccatccagggcgccatcgcgcactgcaagcgttcccagctgctgcagcccgggatggtggcctcggcggcggcgcggaggagcgtcagcgacgtcatgttctactcggtgaccaacacgcccagagcctcttccgtgaccgccggcgaggtggcgcaggagaggaggcaggagatgtgcaggggc

SEQ ID NO: 728 - DNA, 981 bp, Artificial sequence; identical to SEQ ID NO: 727
  miRNA-Resistant target example

SEQ ID NO: 729 - DNA, 981 bp, Artificial sequence; identical to SEQ ID NO: 727
  miRNA-Resistant target example

SEQ ID NO: 730 - DNA, 981 bp, Artificial sequence
  miRNA-Resistant target example
atgccgaggccgcccacaatggtgatccaggacgactacatcgacatggacctgaccccggcagccacaccggagccctcgccagcctcgccccgcttcgagttccagagcgccggcgccggcgccgccggcgacaggcatagggaggcggcgttcgcgtcccccgcggacgagctgttctacaagggcaacctgctgccgctccacctgccgccgcggctgcagctcgtgcagaggctcctccaggaccaggagcagccgccgccgctgcgaggggcgaagcgggatgcggagtcggatgccacggcggcggcggcggcagagcgaggagacgccgacgctgccgctgccgccagcaaggtgtgcgccgccaagaagccgtcttgggccaagaagctcaaggtggttaagcggtgggcgtcgaaggagtacatccggtcgctcttcctggccaggccgccgttgccgagcgacatcgtcgccgccgccggtggcgccagcgccagcggccacggcatcggcagcgtcagcgcgagggggagcgtcctagagcaggaggaggtgtgccagtgccagcaccgcaagtccttctccggcatcatccgccgggtgcgcctcgtggcgaccaaggcgcctgggacctcgccgctgtgctcctcctcgtcctcgtcctcctcgtcgtccacgccgtcgtgccgcaacgccaacggatttttttttagaacaccggcgtcggcggcgggggcgacgccggcgctgaagcggagcagcagcgccgggtcgtccgaggagggcgccatccagggcgccatcgcgcactgcaagcgttcccagctgctgcagcccgggatggtggcctcggcggcggcgcggaggagcgtcagcgacgtcatgttctactcggtgaccaacacgcccagagcctcttccgtgaccgccggcgaggtggcgcaggagaggaggcaggagatgtgcaggggc

SEQ ID NO: 731 - DNA, 852 bp, Artificial sequence
  miRNA-Resistant target example
atgaggtgcaagaagcacccgtaccaggtcggcggcggtggcgtctgtgccacgtgcctccgcgaccgcctgatcgcgctggaggccgcgcagaacggcgacgcgtcgtcgtcgccgccgccgcccgccgcggcgcccgcgttcccgaggtcggtgtccccgtacgtgtcccgcaggaagtcggacacgtcgggcgggggcggcgcgctcaggcaccacccatcattattattttttagaacaccgcaggtagggcccgcctacggcggcggcgcgttggaggaaggcgacataggctacgagtacaagaggcggcgcgccggcaagttctccgtgctcgccacgctcttcggccaccaccacggtcacagatcggaagagacgcaccaggaaggcgccacggagcggaagaaacattcttggttcgccgcgatcatgccgcgccgccgcaagaagcaggcggcgccggcctcgatcacctcgccacggtcagccccgccgaggcgctcctgccgcgtggtcagcaaccgggggctgtcgccggagcgggacagccacggcagcggcgacgagagcagctcgcccgccgcggatcccccgtggcggccgtccccgtcccccatgcggaggacccgctgccggcgccgccagacgaacagcatgccgtcgggtttcgccgtctgcctcagcccgctcgtgcggcccagcccggggcgccgccgccacgtccagccgccggacccgggctccttctcctccgagttccggccgtcgccgctccacagtctctcgtctgctgcctccgttacgcgctgtcgctccaggaagctcgccgacgtcggccgcttccgg

SEQ ID NO: 732 - DNA, 852 bp, Artificial sequence
  miRNA-Resistant target example
atgaggtgcaagaagcacccgtaccaggtcggcggcggtggcgtctgtgccacgtgcctccgcgaccgcctgatcgcgctggaggccgcgcagaacggcgacgcgtcgtcgtcgccgccgccgcccgccgcggcgcccgcgttcccgaggtcggtgtccccgtacgtgtcccgcaggaagtcggacacgtcgggcgggggcggcgcgctcaggcaccacccgtcattattattttttagaacaccgcaggtagggcccgcctacggcggcggcgcgttggaggaaggcgacataggctacgagtacaagaggcggcgcgccggcaagttctccgtgctcgccacgctcttcggccaccaccacggtcacagatcggaagagacgcaccaggaaggcgccacggagcggaagaaacattcttggttcgccgcgatcatgccgcgccgccgcaagaagcaggcggcgccggcctcgatcacctcgccacggtcagccccgccgaggcgctcctgccgcgtggtcagcaaccgggggctgtcgccggagcgggacagccacggcagcggcgacgagagcagctcgcccgccgcggatcccccgtggcggccgtccccgtcccccatgcggaggacccgctgccggcgccgccagacgaacagcatgccgtcgggtttcgccgtctgcctcagcccgctcgtgcggcccagcccggggcgccgccgccacgtccagccgccggacccgggctccttctcctccgagttccggccgtcgccgctccacagtctctcgtctgctgcctccgttacgcgctgtcgctccaggaagctcgccgacgtcggccgcttccgg

SEQ ID NO: 733 - DNA, 852 bp, Artificial sequence; identical to SEQ ID NO: 732
  miRNA-Resistant target example

SEQ ID NO: 734 - DNA, 852 bp, Artificial sequence; identical to SEQ ID NO: 732
  miRNA-Resistant target example

SEQ ID NO: 735 - DNA, 852 bp, Artificial sequence
  miRNA-Resistant target example
atgaggtgcaagaagcacccgtaccaggtcggcggcggtggcgtctgtgccacgtgcctccgcgaccgcctgatcgcgctggaggccgcgcagaacggcgacgcgtcgtcgtcgccgccgccgcccgccgcggcgcccgcgttcccgaggtcggtgtccccgtacgtgtcccgcaggaagtcggacacgtcgggcgggggcggcgcgctcaggcaccacccaagcttattattttttagaacaccgcaggtagggcccgcctacggcggcggcgcgttggaggaaggcgacataggctacgagtacaagaggcggcgcgccggcaagttctccgtgctcgccacgctcttcggccaccaccacggtcacagatcggaagagacgcaccaggaaggcgccacggagcggaagaaacattcttggttcgccgcgatcatgccgcgccgccgcaagaagcaggcggcgccggcctcgatcacctcgccacggtcagccccgccgaggcgctcctgccgcgtggtcagcaaccgggggctgtcgccggagcgggacagccacggcagcggcgacgagagcagctcgcccgccgcggatcccccgtggcggccgtccccgtcccccatgcggaggacccgctgccggcgccgccagacgaacagcatgccgtcgggtttcgccgtctgcctcagcccgctcgtgcggcccagcccggggcgccgccgccacgtccagccgccggacccgggctccttctcctccgagttccggccgtcgccgctccacagtctctcgtctgctgcctccgttacgcgctgtcgctccaggaagctcgccgacgtcggccgcttccgg

SEQ ID NO: 736 - DNA, 1473 bp, Artificial sequence
  miRNA-Resistant target example
atgaagacccggagctcagcgagaggggagccgaggcggctcgggaatgcggctctcctggcgctcatgctctgctccgtcgtcgcgctctccctcatccgggggaggttcgccccaattggtagcaccgcaggagacgccatcaaatccgaggacgacgctgctgcagcggcggtggcggtcagcaaggcggctgctgtcaacgttgacaccggcgacggcgccgacgaggccgccgctgaagctgctgctgaggagaaagacaaggaggaggtccagccgaagccagccgccgacggttcccgcggcggcgcagccaagccggtgtgctacgagacgagccgccgctccgacacctgcgaggcggctggcgacgtgcgcgtgttggggagctcccagacggtgtacgtcgactcgctggaccgggagtggaagaccaagccgtactgccggaagcacgacaacttcgcgctcgcccacgtcaaggagtggtccctcaagccgctcccctccggcgctgcgccgcagtgcacggtgaacagctcggccaccgcgttcgtgctctccacgggcggcttcacgggcaacccgttccacgactacacggacgtgctgatcccggccttcatcacggcgcacccgctccgcggcgaggtccagttcctggtcagcagctacaagtcgtggtggatgaaccgctacatccagatcttccagcagatgagccggcacgaggtggtggacatcgacgccgacgacgaggtccgctgctaccggaacgtggtggtggggccgacgttccaccgtgagctcggcgtggacgcgtccaagtccccgtcgccgggatatagtacagcagattttcgcaagatgctgcgcgacgcgttcgggctggagcgcgccacggccacgcccagcggcgaccggtgggacatccggcgccggccgcggctgctcatcatctcgcgccgcccgtcccgcgggcgcgccttcatgaacgagcgcgccatggcggacatggcggcgagcctcgggttcgacgtgcggatcggggagcccgacagcagcaccgacacgtccaagttcgcgcggctggtgaactcggcggacgtgatggtgggcgtccacggcgccgggctcaccaacatggtgttcctgccggccggcgccgtggtggtgcaggtggtgccgtacggccggctggagtggctggcccggaacacgttcgcggagccgtcggcggggatggaggtccactacctggagtacgtggtgcagctggacgagacgacgctgagcgagcagtacccgagcgatcacccggtgctgagggaccccatggccatccacaagcaggggtggaacgcgctcaagaccacgtacctggacaagcagaacgtgcgcccgcacctgggccgcctcaagaacaccttcctacaggcgctcaagatgctgccgcacggccgggacgat

SEQ ID NO: 737 - DNA, 1473 bp, Artificial sequence
  miRNA-Resistant target example
atgaagacccggagctcagcgagaggggagccgaggcggctcgggaatgcggctctcctggcgctcatgctctgctccgtcgtcgcgctctccctcatccgggggaggttcgccccaattggtagcaccgcaggagacgccatcaaatccgaggacgacgctgctgcagcggcggtggcggtcagcaaggcggctgctgtcaacgttgacaccggcgacggcgccgacgaggccgccgctgaagctgctgctgaggagaaagacaaggaggaggtccagccgaagccagccgccgacggttcccgcggcggcgcagccaagccggtgtgctacgagacgagccgccgctccgacacctgcgaggcggctggcgacgtgcgcgtgttggggagctcccagacggtgtacgtcgactcgctggaccgggagtggaagaccaagccgtactgccggaagcacgacaacttcgcgctcgcccacgtcaaggagtggtccctcaagccgctcccctccggcgctgcgccgcagtgcacggtgaacagctcggccaccgcgttcgtgctctccacgggcggcttcacgggcaacccgttccacgactacacggacgtgctgatcccggccttcatcacggcgcacccgctccgcggcgaggtccagttcctggtcagcagctacaagtcgtggtggatgaaccgctacatccagatcttccagcagatgagccggcacgaggtggtggacatcgacgccgacgacgaggtccgctgctaccggaacgtggtggtggggccgacgttccaccgtgagctcggcgtggacgcgtccaagtccccgtcgccggggtatagtacagcagattttcgcaagatgctgcgcgacgcgttcgggctggagcgcgccacggccacgcccagcggcgaccggtgggacatccggcgccggccgcggctgctcatcatctcgcgccgcccgtcccgcgggcgcgccttcatgaacgagcgcgccatggcggacatggcggcgagcctcgggttcgacgtgcggatcggggagcccgacagcagcaccgacacgtccaagttcgcgcggctggtgaactcggcggacgtgatggtgggcgtccacggcgccgggctcaccaacatggtgttcctgccggccggcgccgtggtggtgcaggtggtgccgtacggccggctggagtggctggcccggaacacgttcgcggagccgtcggcggggatggaggtccactacctggagtacgtggtgcagctggacgagacgacgctgagcgagcagtacccgagcgatcacccggtgctgagggaccccatggccatccacaagcaggggtggaacgcgctcaagaccacgtacctggacaagcagaacgtgcgcccgcacctgggccgcctcaagaacaccttcctacaggcgctcaagatgctgccgcacggccgggacgat

SEQ ID NO: 738 - DNA, 1473 bp, Artificial sequence; identical to SEQ ID NO: 737
  miRNA-Resistant target example

SEQ ID NO: 739 - DNA, 1473 bp, Artificial sequence; identical to SEQ ID NO: 737
  miRNA-Resistant target example

SEQ ID NO: 740 - DNA, 1473 bp, Artificial sequence
  miRNA-Resistant target example
atgaagacccggagctcagcgagaggggagccgaggcggctcgggaatgcggctctcctggcgctcatgctctgctccgtcgtcgcgctctccctcatccgggggaggttcgccccaattggtagcaccgcaggagacgccatcaaatccgaggacgacgctgctgcagcggcggtggcggtcagcaaggcggctgctgtcaacgttgacaccggcgacggcgccgacgaggccgccgctgaagctgctgctgaggagaaagacaaggaggaggtccagccgaagccagccgccgacggttcccgcggcggcgcagccaagccggtgtgctacgagacgagccgccgctccgacacctgcgaggcggctggcgacgtgcgcgtgttggggagctcccagacggtgtacgtcgactcgctggaccgggagtggaagaccaagccgtactgccggaagcacgacaacttcgcgctcgcccacgtcaaggagtggtccctcaagccgctcccctccggcgctgcgccgcagtgcacggtgaacagctcggccaccgcgttcgtgctctccacgggcggcttcacgggcaacccgttccacgactacacggacgtgctgatcccggccttcatcacggcgcacccgctccgcggcgaggtccagttcctggtcagcagctacaagtcgtggtggatgaaccgctacatccagatcttccagcagatgagccggcacgaggtggtggacatcgacgccgacgacgaggtccgctgctaccggaacgtggtggtggggccgacgttccaccgtgagctcggcgtggacgcgtccaagtccccgtcgccgggatacagtacagcagattttcgcaagatgctgcgcgacgcgttcgggctggagcgcgccacggccacgcccagcggcgaccggtgggacatccggcgccggccgcggctgctcatcatctcgcgccgcccgtcccgcgggcgcgccttcatgaacgagcgcgccatggcggacatggcggcgagcctcgggttcgacgtgcggatcggggagcccgacagcagcaccgacacgtccaagttcgcgcggctggtgaactcggcggacgtgatggtgggcgtccacggcgccgggctcaccaacatggtgttcctgccggccggcgccgtggtggtgcaggtggtgccgtacggccggctggagtggctggcccggaacacgttcgcggagccgtcggcggggatggaggtccactacctggagtacgtggtgcagctggacgagacgacgctgagcgagcagtacccgagcgatcacccggtgctgagggaccccatggccatccacaagcaggggtggaacgcgctcaagaccacgtacctggacaagcagaacgtgcgcccgcacctgggccgcctcaagaacaccttcctacaggcgctcaagatgctgccgcacggccgggacgat

SEQ ID NO: 741 - DNA, 597 bp, Artificial sequence
  miRNA-Resistant target example
atgtccctgctcggatctctgccttccgccatggccacgtccaccacttttagctgccgctgtttttcctctggtgctcgcccctgcgttggtcatgcgcctggttgccgagtccctgcttcctgcgccctggcgcccaaccccacgcggcctccctgctcggaccgcgttcttggctccagctcggctctgtcttgtgccggcgtcctctactccatctttttccctagcgcgccctggtattcgctcgctgctgcgcgcgctctcccctgtctgctcgtcgtggacgcgggccgctgcccatgccgagctccattttcaagccccgcaagccgagctctccgtggtcgacgctcccagccctctactcaccgagctccgtgcaggtgcgccccatcccgcctgcactcggaccgcgccctcgctgctggtgctcgccgaccgcggttgtcctgcaccctgttgcgctcgtccaggtcgccgctgtcgagtccctgtgtgcgcagccatgtccctctgctcgccgtgctagccgtctacgtcatcgccggacttgtctccccgaccatcgtgatgttgttatttcctgctgcgccg

SEQ ID NO: 742 - DNA, 597 bp, Artificial sequence
  miRNA-Resistant target example
atgtccctgctcggatctctgccttccgccatggccacgtccaccacttttagctgccgctgtttttcctctggtgctcgcccctgcgttggtcatgcgcctggttgccgagtccctgcttcctgcgccctggcgcccaaccccacgcggcctccctgctcggaccgcgttcttggctccagctcggctctgtcttgtgccggcgtcctctactccatctttttccctagcgcgccctggtattcgctcgctgctgcgcgcgctctcccctgtctgctcgtcgtggacgcgggccgctgcccatgccgagctcccttttcaagccccgcaagccgagctctccgtggtcgacgctcccagccctctactcaccgagctccgtgcaggtgcgccccatcccgcctgcactcggaccgcgccctcgctgctggtgctcgccgaccgcggttgtcctgcaccctgttgcgctcgtccaggtcgccgctgtcgagtccctgtgtgcgcagccatgtccctctgctcgccgtgctagccgtctacgtcatcgccggacttgtctccccgaccatcgtgatgttgttatttcctgctgcgccg

SEQ ID NO: 743 - DNA, 597 bp, Artificial sequence; identical to SEQ ID NO: 742
  miRNA-Resistant target example

SEQ ID NO: 744 - DNA, 597 bp, Artificial sequence; identical to SEQ ID NO: 742
  miRNA-Resistant target example

SEQ ID NO: 745 - DNA, 597 bp, Artificial sequence
  miRNA-Resistant target example
atgtccctgctcggatctctgccttccgccatggccacgtccaccacttttagctgccgctgtttttcctctggtgctcgcccctgcgttggtcatgcgcctggttgccgagtccctgcttcctgcgccctggcgcccaaccccacgcggcctccctgctcggaccgcgttcttggctccagctcggctctgtcttgtgccggcgtcctctactccatctttttccctagcgcgccctggtattcgctcgctgctgcgcgcgctctcccctgtctgctcgtcgtggacgcgggccgctgcccatgccgagctccattctcaagccccgcaagccgagctctccgtggtcgacgctcccagccctctactcaccgagctccgtgcaggtgcgccccatcccgcctgcactcggaccgcgccctcgctgctggtgctcgccgaccgcggttgtcctgcaccctgttgcgctcgtccaggtcgccgctgtcgagtccctgtgtgcgcagccatgtccctctgctcgccgtgctagccgtctacgtcatcgccggacttgtctccccgaccatcgtgatgttgttatttcctgctgcgccg

SEQ ID NO: 746 - DNA, 465 bp, Artificial sequence
  miRNA-Resistant target example
atgtgccctgctcgcccatggcgccagccacagctcggagctccctctgcatccccaggcctgcgcctgctgcttgccccagcttggagctcgctcgacctccagctccggcgcccggctgagctccctggctgccgcgccctgctctcttttgctgctcaccggtgctccagctcgcggcgcccctgcttttctctctcctcctctactcccgccatggcgcgcgtctctgctccctcccccacggcgtgcccctcaagctcgtccaggccgcgacctcgtcgtggaccttcctcgccggcgctcctcccagcacaattaagttcagcacgccccatctcgctgcgctcggcccccagctcggtcttcctcggtcgcgctcgctctggtcgtggacaccgtcgagctcagggccctgctcgccgtatgtccacgcatcatgcgtggagcaatgggggaaatcta

SEQ ID NO: 747 - DNA, 465 bp, Artificial sequence
  miRNA-Resistant target example
atgtgccctgctcgcccatggcgccagccacagctcggagctccctctgcatccccaggcctgcgcctgctgcttgccccagcttggagctcgctcgacctccagctccggcgcccggctgagctccctggctgccgcgccctgctctcttttgctgctcaccggtgctccagctcgcggcgcccctgcttttctctctcctcctctactcccgccatggcgcgcgtctctgctccctcccccacggcgtgcccctcaagctcgtccaggccgcgacctcgtcgtggaccttcctcgccggcgctcctccctgcacaattaagttcagcacgccccatctcgctgcgctcggcccccagctcggtcttcctcggtcgcgctcgctctggtcgtggacaccgtcgagctcagggccctgctcgccgtatgtccacgcatcatgcgtggagcaatgggggaaatcta

SEQ ID NO: 748 - DNA, 465 bp, Artificial sequence; identical to SEQ ID NO: 747
  miRNA-Resistant target example

SEQ ID NO: 749 - DNA, 465 bp, Artificial sequence; identical to SEQ ID NO: 747
  miRNA-Resistant target example

SEQ ID NO: 750 - DNA, 465 bp, Artificial sequence
  miRNA-Resistant target example
atgtgccctgctcgcccatggcgccagccacagctcggagctccctctgcatccccaggcctgcgcctgctgcttgccccagcttggagctcgctcgacctccagctccggcgcccggctgagctccctggctgccgcgccctgctctcttttgctgctcaccggtgctccagctcgcggcgcccctgcttttctctctcctcctctactcccgccatggcgcgcgtctctgctccctcccccacggcgtgcccctcaagctcgtccaggccgcgacctcgtcgtggaccttcctcgccggcgctcctcccagctcaattaagttcagctcgccccatctcgctgcgctcggcccccagctcggtcttcctcggtcgcgctcgctctggtcgtggacaccgtcgagctcagggccctgctcgccgtatgtccacgcatcatgcgtggagcaatgggggaaatcta

SEQ ID NO: 751 - DNA, 2544 bp, Artificial sequence
  miRNA-Resistant target example
atggcggatttcggtggcggcgacagcgagctggaggagcaatccaatgaggggtaccaggagccggcgttcgaggccttcatgtgccctctcaccaagcaggtgatgcacgaccccgtgacgatcgagaccgggcagaccttcgagcgggaggccatcctcaagtggttcagggagtgcagggacagcgggaggaagccgacgtgcccgctcacgcaggcggagctgcgcagcaccgacatcagccccagcatcgccctgcgcaacgtcatcgacgagtggagggcaaggaacgaggacaaggagctggacaaggccttcgcctccctcagtctcaccaccacacagcatgctcaagacgacgccgacaccctgcgcgcactcctctacgtctcccaaatgtgccacaggagcgccgccaagaagaccctcgtgcgcaggcaaggcgtcatacccaccatcactgacctgctcaagagcagcagcagaagggttcgcctcaaggccctcgaagtccttcgtctcatcgtcgaggacaacgacgaaaataaggaagagctggggaaaggtgacaccatacgcaccatcatcaagttcctgtccaatgagaatttccaagagagggagcttgcagtttcgctattgtacgagctctcaaagctcgatcctatatgcgaaaggatcggcgcaatctacggggccatactcctactggttgggatggcaagcagcaaatcagagaatggtgtggctgtggagaaagccgagaacacgctcaagaatctggacaagtacgaaacaaacgtcaagcaaatggctgagaacggcaggcttcagcctctgcttacaaaacttattcaaggcacacctcaagttcaggtcgccatggctgaatacctcggcgagcttgcgttggcgaacgacgtgaaggtggtggtggcagagcaggtcggggctctgctcgtgagcatcttgaagacgggcagccttccggcaagagaggccacgctcaaagccctgagggagatatcgtcaaacgagtccagcgccaagatcctgctccaggcgggcatcctgccgccgctggtgaaggacctcttctccttgggcgccggccacctgccgatgaggctcaaggaggtgtcggccgcgatcctggccaacctggtggcgtcgggcgccagcttccggtccatcccgctggacgagagcggggagacgctgctgtcggaggagatggtgcacagcctgctgcacctcatcagcaacaccgggccggccatcgagtgcaagctcctcaacgtcctcgtggggctcaccggctccccgtccacggtggccgacgtggtctccgccatccgcagctccggggccaccatcagcctgatccagttcgtggaggccgcgcaccgggagatccgcgtggagtccctcaagctgctgcgcaacgtgtcgccgtacatgggcgcggagctagcggacgccctcggcctcggaggcagcaccggccacctgggcagcctgctgggggtgatcaccgtcaccgaagaccaccggagcggcgtgacggaggagcaggcggcggccgtggctctgctgggcgacctccccgagagggactggaacctgacgcggcagctgcaggagctgggcgcgttccgggcgctggcgacgaagctggtggagctccggcggggcacgatccgcggcaaccggcacgtggcgcccttcacggagggggcggtgaaggtgctgtacagggtgacgtgcgcgctgcagctgcagctgcaggaagaggaggcggcggaggtgtacgtggagctggcgcgggaggtgggcctggcgccgctcttcgtggagctgctgcagcagcagatgagcagcgggcaggacgccgtgctgctctactcggccatggcgctggagaacctgtcgctgcagtcggcgaggctcacggacgtgccggagccgccgccgccgcctgggagcctcctcatgtgcgggtgcttcgggggccccaggcacaggcacgggcacggcaagcagccgcagccgcagctgcccggggccatggggacgtgccgcgtccacggcggcttctgctcgctgcgggagacgttctgcctggcggagagcgggtgcaaggcggtggagcggctggtggcgtgcctggagcacgcggatgaccgcgtggtggaggcggcgctggcggccttgtccacgctggtgggggacggcgtggccaacgcgacggagggggtgctggtggtcggggaggcggaggggctgcgccccgtggtggaggtgctggtggagaaccggacggaggcgctgcagcggcgggcggtgtgggccgtggagcgcatcctgcgcgtcgaggacatcgcgctggaggtggctgctgaccagaccgtggcctccgcgctcgtggaggcctaccgcaacggcgacgtccgcacccggcagacggcggagcgcgcgctccgccacctggacaggataccaaattttagttcagcattccaccaggccaaaggcagggca

SEQ ID NO: 752 - DNA, 2544 bp, Artificial sequence
  miRNA-Resistant target example
atggcggatttcggtggcggcgacagcgagctggaggagcaatccaatgaggggtaccaggagccggcgttcgaggccttcatgtgccctctcaccaagcaggtgatgcacgaccccgtgacgatcgagaccgggcagaccttcgagcgggaggccatcctcaagtggttcagggagtgcagggacagcgggaggaagccgacgtgcccgctcacgcaggcggagctgcgcagcaccgacatcagccccagcatcgccctgcgcaacgtcatcgacgagtggagggcaaggaacgaggacaaggagctggacaaggccttcgcctccctcagtctcaccaccacacagcatgctcaagacgacgccgacaccctgcgcgcactcctctacgtctcccaaatgtgccacaggagcgccgccaagaagaccctcgtgcgcaggcaaggcgtcatacccaccatcactgacctgctcaagagcagcagcagaagggttcgcctcaaggccctcgaagtccttcgtctcatcgtcgaggacaacgacgaaaataaggaagagctggggaaaggtgacaccatacgcaccatcatcaagttcctgtccaatgagaatttccaagagagggagcttgcagtttcgctattgtacgagctctcaaagctcgatcctatatgcgaaaggatcggcgcaatctacggggccatactcctactggttgggatggcaagcagcaaatcagagaatggtgtggctgtggagaaagccgagaacacgctcaagaatctggacaagtacgaaacaaacgtcaagcaaatggctgagaacggcaggcttcagcctctgcttacaaaacttattcaaggcacacctcaagttcaggtcgccatggctgaatacctcggcgagcttgcgttggcgaacgacgtgaaggtggtggtggcagagcaggtcggggctctgctcgtgagcatcttgaagacgggcagccttccggcaagagaggccacgctcaaagccctgagggagatatcgtcaaacgagtccagcgccaagatcctgctccaggcgggcatcctgccgccgctggtgaaggacctcttctccttgggcgccggccacctgccgatgaggctcaaggaggtgtcggccgcgatcctggccaacctggtggcgtcgggcgccagcttccggtccatcccgctggacgagagcggggagacgctgctgtcggaggagatggtgcacagcctgctgcacctcatcagcaacaccgggccggccatcgagtgcaagctcctcaacgtcctcgtggggctcaccggctccccgtccacggtggccgacgtggtctccgccatccgcagctccggggccaccatcagcctgatccagttcgtggaggccgcgcaccgggagatccgcgtggagtccctcaagctgctgcgcaacgtgtcgccgtacatgggcgcggagctagcggacgccctcggcctcggaggcagcaccggccacctgggcagcctgctgggggtgatcaccgtcaccgaagaccaccggagcggcgtgacggaggagcaggcggcggccgtggctctgctgggcgacctccccgagagggactggaacctgacgcggcagctgcaggagctgggcgcgttccgggcgctggcgacgaagctggtggagctccggcggggcacgatccgcggcaaccggcacgtggcgcccttcacggagggggcggtgaaggtgctgtacagggtgacgtgcgcgctgcagctgcagctgcaggaagaggaggcggcggaggtgtacgtggagctggcgcgggaggtgggcctggcgccgctcttcgtggagctgctgcagcagcagatgagcagcgggcaggacgccgtgctgctctactcggccatggcgctggagaacctgtcgctgcagtcggcgaggctcacggacgtgccggagccgccgccgccgcctgggagcctcctcatgtgcgggtgcttcgggggccccaggcacaggcacgggcacggcaagcagccgcagccgcagctgcccggggccatggggacgtgccgcgtccacggcggcttctgctcgctgcgggagacgttctgcctggcggagagcgggtgcaaggcggtggagcggctggtggcgtgcctggagcacgcggatgaccgcgtggtggaggcggcgctggcggccttgtccacgctggtgggggacggcgtggccaacgcgacggagggggtgctggtggtcggggaggcggaggggctgcgccccgtggtggaggtgctggtggagaaccggacggaggcgctgcagcggcgggcggtgtgggccgtggagcgcatcctgcgcgtcgaggacatcgcgctggaggtggctgctgaccagaccgtggcctccgcgctcgtggaggcctaccgcaacggcgacgtccgcacccggcagacggcggagcgcgcgctccgccacctggacaggatcccaaattttagttcagcattccaccaggccaaaggcagggca

SEQ ID NO: 753 - DNA, 2544 bp, Artificial sequence; identical to SEQ ID NO: 752
  miRNA-Resistant target example

SEQ ID NO: 754 - DNA, 2544 bp, Artificial sequence
  miRNA-Resistant target example
atggcggatttcggtggcggcgacagcgagctggaggagcaatccaatgaggggtaccaggagccggcgttcgaggccttcatgtgccctctcaccaagcaggtgatgcacgaccccgtgacgatcgagaccgggcagaccttcgagcgggaggccatcctcaagtggttcagggagtgcagggacagcgggaggaagccgacgtgcccgctcacgcaggcggagctgcgcagcaccgacatcagccccagcatcgccctgcgcaacgtcatcgacgagtggagggcaaggaacgaggacaaggagctggacaaggccttcgcctccctcagtctcaccaccacacagcatgctcaagacgacgccgacaccctgcgcgcactcctctacgtctcccaaatgtgccacaggagcgccgccaagaagaccctcgtgcgcaggcaaggcgtcatacccaccatcactgacctgctcaagagcagcagcagaagggttcgcctcaaggccctcgaagtccttcgtctcatcgtcgaggacaacgacgaaaataaggaagagctggggaaaggtgacaccatacgcaccatcatcaagttcctgtccaatgagaatttccaagagagggagcttgcagtttcgctattgtacgagctctcaaagctcgatcctatatgcgaaaggatcggcgcaatctacggggccatactcctactggttgggatggcaagcagcaaatcagagaatggtgtggctgtggagaaagccgagaacacgctcaagaatctggacaagtacgaaacaaacgtcaagcaaatggctgagaacggcaggcttcagcctctgcttacaaaacttattcaaggcacacctcaagttcaggtcgccatggctgaatacctcggcgagcttgcgttggcgaacgacgtgaaggtggtggtggcagagcaggtcggggctctgctcgtgagcatcttgaagacgggcagccttccggcaagagaggccacgctcaaagccctgagggagatatcgtcaaacgagtccagcgccaagatcctgctccaggcgggcatcctgccgccgctggtgaaggacctcttctccttgggcgccggccacctgccgatgaggctcaaggaggtgtcggccgcgatcctggccaacctggtggcgtcgggcgccagcttccggtccatcccgctggacgagagcggggagacgctgctgtcggaggagatggtgcacagcctgctgcacctcatcagcaacaccgggccggccatcgagtgcaagctcctcaacgtcctcgtggggctcaccggctccccgtccacggtggccgacgtggtctccgccatccgcagctccggggccaccatcagcctgatccagttcgtggaggccgcgcaccgggagatccgcgtggagtccctcaagctgctgcgcaacgtgtcgccgtacatgggcgcggagctagcggacgccctcggcctcggaggcagcaccggccacctgggcagcctgctgggggtgatcaccgtcaccgaagaccaccggagcggcgtgacggaggagcaggcggcggccgtggctctgctgggcgacctccccgagagggactggaacctgacgcggcagctgcaggagctgggcgcgttccgggcgctggcgacgaagctggtggagctccggcggggcacgatccgcggcaaccggcacgtggcgcccttcacggagggggcggtgaaggtgctgtacagggtgacgtgcgcgctgcagctgcagctgcaggaagaggaggcggcggaggtgtacgtggagctggcgcgggaggtgggcctggcgccgctcttcgtggagctgctgcagcagcagatgagcagcgggcaggacgccgtgctgctctactcggccatggcgctggagaacctgtcgctgcagtcggcgaggctcacggacgtgccggagccgccgccgccgcctgggagcctcctcatgtgcgggtgcttcgggggccccaggcacaggcacgggcacggcaagcagccgcagccgcagctgcccggggccatggggacgtgccgcgtccacggcggcttctgctcgctgcgggagacgttctgcctggcggagagcgggtgcaaggcggtggagcggctggtggcgtgcctggagcacgcggatgaccgcgtggtggaggcggcgctggcggccttgtccacgctggtgggggacggcgtggccaacgcgacggagggggtgctggtggtcggggaggcggaggggctgcgccccgtggtggaggtgctggtggagaaccggacggaggcgctgcagcggcgggcggtgtgggccgtggagcgcatcctgcgcgtcgaggacatcgcgctggaggtggctgctgaccagaccgtggcctccgcgctcgtggaggcctaccgcaacggcgacgtccgcacccggcagacggcggagcgcgcgctccgccacctggacaggatacccaattttagttcagcattccaccaggccaaaggcagggca

SEQ ID NO: 755 - DNA, 2544 bp, Artificial sequence; identical to SEQ ID NO: 754
  miRNA-Resistant target example

SEQ ID NO: 756 - DNA, 1476 bp, Artificial sequence
  miRNA-Resistant target example
atgacgctggtgaggatgccttgccgcctctgctgcttcctgctcgtcgtcgccgcctccgccgtctccgggcgggggcgggtggtcaccaccctcccgggctacgagggccgcctccccttccacctcgaaacagggtatgtggaggtggacgaggacgccggcgcggagctcttctactacttcgtccgggccgagtccggcgccgacgacagcgacaccccgttcgtcctccggatccccggcggccaacgctgctccgccttcagcggcctcgcctacgagataggtcccatcatgtttgtcgtggagccctacaacggcagcttgccgcgcctgcgctacaacccaaactcgtggacaaaggtggcgcatattctttttgtggattcaccagttggggccgggttttccttctccagagatgccaaaggttacaacgctggagcggtatcaaccacgatgcacttggcgaagttcctcaccaagtggttcaatgaccatcccgagtaccatgcaaatcctttctacatcgatggagaatcatacgctggaaaaattgtaccattccttgcacagatgatttcagaaggtattgaagcaggaatgaagtcggcacctcgtctcaagggctatctagtgggcaacccgtccacagaggagcgtattgatgttagcgctagagtgccttgtgctcacgggtttgggattatatcacatcagttgtatgagatgatattggggcattgccatggagaggactactccaatcctgcaaaagagttgtgtggtcaggcactgaagaccttcaataatctcacctccgaagttgcgcaaggccatgtactgcaggagaaatgcgtcgcggcgtcgtcgtctcctgtgccgaacgcaaacagcagggtggccggcggctcgtcgtcgtgggcctcagatggcaggaagatcctacgggaggaagaaatggtgggacgacgcggagtagtactgggcaagctatttcatcccccagcattaccacccttttcatgcagggtttaccggtactacctgtcgtatttctgggcaaacgacaggcgcacccgggatgctcttgggatcaaggagggcaccgtggatgagtgggtcagatgccacaacgacgaccaagagttgccttacgagagcgagctgaagagtgtcgtcaagtaccaccggaacctgacgtccagaggctaccgcgccctggtatacagcggcgaccatgacctgctggtgccacatctgggcacccaggcctgggtcaggtcgctcaacttccccgtcgtggacgactggagggcgtggcatctcggtggccagtcagctggatttacgacaacttactcaaacaacatgacattcgcgacgatcaagggcgccgggcatacggcgcctgagtacgagccggagaggtgtttcgccatgttcagccgttggatcctcaaccggccactc

SEQ ID NO: 757 - DNA, 1476 bp, Artificial sequence
  miRNA-Resistant target example
atgacgctggtgaggatgccttgccgcctctgctgcttcctgctcgtcgtcgccgcctccgccgtctccgggcgggggcgggtggtcaccaccctcccgggctacgagggccgcctccccttccacctcgaaacagggtatgtggaggtggacgaggacgccggcgcggagctcttctactacttcgtccgggccgagtccggcgccgacgacagcgacaccccgttcgtcctccggatccccggcggccaacgctgctccgccttcagcggcctcgcctacgagataggtcccatcatgtttgtcgtggagccctacaacggcagcttgccgcgcctgcgctacaacccaaactcgtggacaaaggtggcgcatattctttttgtggattcaccagttggggccgggttttccttctccagagatgccaaaggttacaacgctggagcggtatcaaccacgatgcacttggcgaagttcctcaccaagtggttcaatgaccatcccgagtaccatgcaaatcctttctacatcgatggagaatcatacgctggaaaaattgtaccattccttgcacagatgatttcagaaggtattgaagcaggaatgaagtcggcacctcgtctcaagggctatctagtgggcaacccgtccacagaggagcgtattgatgttagcgctagagtgccttgtgctcacgggtttgggattatatcacatcagttgtatgagatgatattggggcattgccatggagaggactactccaatcctgcaaaagagttgtgtggtcaggcactgaagaccttcaataatctcacctccgaagttgcgcaaggccatgtactgcaggagaaatgcgtcgcggcgtcgtcgtctcctgtgccgaacgcaaacagcagggtggccggcggctcgtcgtcgtgggcctcagatggcaggaagatcctacgggaggaagaaatggtgggacgacgcggagtagtactgggcaagctatttcatccaccagcattaccaccattttcatgcagggtttaccggtactacctgtcgtatttctgggcaaacgacaggcgcacccgggatgctcttgggatcaaggagggcaccgtggatgagtgggtcagatgccacaacgacgaccaagagttgccttacgagagcgagctgaagagtgtcgtcaagtaccaccggaacctgacgtccagaggctaccgcgccctggtatacagcggcgaccatgacctgctggtgccacatctgggcacccaggcctgggtcaggtcgctcaacttccccgtcgtggacgactggagggcgtggcatctcggtggccagtcagctggatttacgacaacttactcaaacaacatgacattcgcgacgatcaagggcgccgggcatacggcgcctgagtacgagccggagaggtgtttcgccatgttcagccgttggatcctcaaccggccactc

SEQ ID NO: 758 - DNA, 1476 bp, Artificial sequence; identical to SEQ ID NO: 757
  miRNA-Resistant target example

SEQ ID NO: 759 - DNA, 1476 bp, Artificial sequence; identical to SEQ ID NO: 757
  miRNA-Resistant target example

SEQ ID NO: 760 - DNA, 1476 bp, Artificial sequence
  miRNA-Resistant target example
atgacgctggtgaggatgccttgccgcctctgctgcttcctgctcgtcgtcgccgcctccgccgtctccgggcgggggcgggtggtcaccaccctcccgggctacgagggccgcctccccttccacctcgaaacagggtatgtggaggtggacgaggacgccggcgcggagctcttctactacttcgtccgggccgagtccggcgccgacgacagcgacaccccgttcgtcctccggatccccggcggccaacgctgctccgccttcagcggcctcgcctacgagataggtcccatcatgtttgtcgtggagccctacaacggcagcttgccgcgcctgcgctacaacccaaactcgtggacaaaggtggcgcatattctttttgtggattcaccagttggggccgggttttccttctccagagatgccaaaggttacaacgctggagcggtatcaaccacgatgcacttggcgaagttcctcaccaagtggttcaatgaccatcccgagtaccatgcaaatcctttctacatcgatggagaatcatacgctggaaaaattgtaccattccttgcacagatgatttcagaaggtattgaagcaggaatgaagtcggcacctcgtctcaagggctatctagtgggcaacccgtccacagaggagcgtattgatgttagcgctagagtgccttgtgctcacgggtttgggattatatcacatcagttgtatgagatgatattggggcattgccatggagaggactactccaatcctgcaaaagagttgtgtggtcaggcactgaagaccttcaataatctcacctccgaagttgcgcaaggccatgtactgcaggagaaatgcgtcgcggcgtcgtcgtctcctgtgccgaacgcaaacagcagggtggccggcggctcgtcgtcgtgggcctcagatggcaggaagatcctacgggaggaagaaatggtgggacgacgcggagtagtactgggcaagctatttcatcccccggcattaccgcccttttcatgcagggtttaccggtactacctgtcgtatttctgggcaaacgacaggcgcacccgggatgctcttgggatcaaggagggcaccgtggatgagtgggtcagatgccacaacgacgaccaagagttgccttacgagagcgagctgaagagtgtcgtcaagtaccaccggaacctgacgtccagaggctaccgcgccctggtatacagcggcgaccatgacctgctggtgccacatctgggcacccaggcctgggtcaggtcgctcaacttccccgtcgtggacgactggagggcgtggcatctcggtggccagtcagctggatttacgacaacttactcaaacaacatgacattcgcgacgatcaagggcgccgggcatacggcgcctgagtacgagccggagaggtgtttcgccatgttcagccgttggatcctcaaccggccactc

SEQ ID NO: 761 - DNA, 1473 bp, Artificial sequence
  miRNA-Resistant target example
atgacgctggtgaggatgccttgccgcctctgctgcttcctgctcgtcgtcgccgcctccgccgtctccgggcgggggcgggtggtcaccaccctcccgggctacgagggccgcctccccttccacctcgaaacagggtatgtggaggtggacgaggacgccggcgcggagctcttctactacttcgtccgggccgagtccggcgccgacgacagcgacaccccgttcgtcctccggatccccggcggccaacgctgctccgccttcagcggcctcgcctacgagataggtcccatcatgttcgtcgtggagccctacaacggcagcttgccgcgcctgcgctacaacccaaactcgtggacaaaggtggcgcatattctttttgtggattcgccagttggggccgggttttccttctccagagatgccaaaggctacaacgctggagcggtatcaaccacgctgcacttggcgaagttcctcaacaagtggttcaacgaccatcctgagtaccatgcaaatcctttctacatcgatggagaatcatacgctggaaaaattgtaccattccttgcacagatgatttcagaaggtattggagcaggaatgaagtcggcacctcgtctcaagggctatctagtgggcaacccgtccacagaggagcgtattgatgttagcgctagagtgccttgtgctcacgggtttgggattatatcacatcagttgtatgagatgatattggggcattgccatggagaggactactccaatcctgcaaaagagttgtgtggtcaggcactgaagaccttcaatgatctcacctcggaagttgcgcaaggccatgtactgcaggagaaatgcgtcgcggcgtcgtcgtctcctgtgctgaacgcaaacagcagggtggccggcggctcgtcgtcgtgggcctcagatggcaggaagatcctacgggaggaagaaatggtgggacgacgcggagtactgggcaagctatttcatcccccagcattaccacccttttcatgcagagtttaccggtactacctgtcgtatttctgggcaaacgacaggcgcacccgggatgctcttgggatcaaggagggcaccgtggatgagtgggtcagatgccacaacgacgaccaagagttgccttacgagagcgagctgaagagtgtcgtcaagtaccaccggaacctgacgtccagaggctaccgagccatggtatacagcggcgaccatgacctgctggtgccacatctgggcacccaggcctgggtcaggtcgctcaacttccccgtcgtggacgactggagggcgtggcatctcggtggccagtcagctggatttacaataacttactcaaacaacatgacattcgcgacgatcaagggcgccgggcatacagcacctgagtacgagccggagaggtgtttcgccatgttcagccgttggatcctcaaccggccactc

SEQ ID NO: 762 - DNA, 1473 bp, Artificial sequence
  miRNA-Resistant target example
atgacgctggtgaggatgccttgccgcctctgctgcttcctgctcgtcgtcgccgcctccgccgtctccgggcgggggcgggtggtcaccaccctcccgggctacgagggccgcctccccttccacctcgaaacagggtatgtggaggtggacgaggacgccggcgcggagctcttctactacttcgtccgggccgagtccggcgccgacgacagcgacaccccgttcgtcctccggatccccggcggccaacgctgctccgccttcagcggcctcgcctacgagataggtcccatcatgttcgtcgtggagccctacaacggcagcttgccgcgcctgcgctacaacccaaactcgtggacaaaggtggcgcatattctttttgtggattcgccagttggggccgggttttccttctccagagatgccaaaggctacaacgctggagcggtatcaaccacgctgcacttggcgaagttcctcaacaagtggttcaacgaccatcctgagtaccatgcaaatcctttctacatcgatggagaatcatacgctggaaaaattgtaccattccttgcacagatgatttcagaaggtattggagcaggaatgaagtcggcacctcgtctcaagggctatctagtgggcaacccgtccacagaggagcgtattgatgttagcgctagagtgccttgtgctcacgggtttgggattatatcacatcagttgtatgagatgatattggggcattgccatggagaggactactccaatcctgcaaaagagttgtgtggtcaggcactgaagaccttcaatgatctcacctcggaagttgcgcaaggccatgtactgcaggagaaatgcgtcgcggcgtcgtcgtctcctgtgctgaacgcaaacagcagggtggccggcggctcgtcgtcgtgggcctcagatggcaggaagatcctacgggaggaagaaatggtgggacgacgcggagtactgggcaagctatttcatccaccagcattaccaccattttcatgcagagtttaccggtactacctgtcgtatttctgggcaaacgacaggcgcacccgggatgctcttgggatcaaggagggcaccgtggatgagtgggtcagatgccacaacgacgaccaagagttgccttacgagagcgagctgaagagtgtcgtcaagtaccaccggaacctgacgtccagaggctaccgagccatggtatacagcggcgaccatgacctgctggtgccacatctgggcacccaggcctgggtcaggtcgctcaacttccccgtcgtggacgactggagggcgtggcatctcggtggccagtcagctggatttacaataacttactcaaacaacatgacattcgcgacgatcaagggcgccgggcatacagcacctgagtacgagccggagaggtgtttcgccatgttcagccgttggatcctcaaccggccactc

SEQ ID NO: 763 - DNA, 1473 bp, Artificial sequence; identical to SEQ ID NO: 762
  miRNA-Resistant target example

SEQ ID NO: 764 - DNA, 1473 bp, Artificial sequence; identical to SEQ ID NO: 762
  miRNA-Resistant target example

SEQ ID NO: 765 - DNA, 1473 bp, Artificial sequence
  miRNA-Resistant target example
atgacgctggtgaggatgccttgccgcctctgctgcttcctgctcgtcgtcgccgcctccgccgtctccgggcgggggcgggtggtcaccaccctcccgggctacgagggccgcctccccttccacctcgaaacagggtatgtggaggtggacgaggacgccggcgcggagctcttctactacttcgtccgggccgagtccggcgccgacgacagcgacaccccgttcgtcctccggatccccggcggccaacgctgctccgccttcagcggcctcgcctacgagataggtcccatcatgttcgtcgtggagccctacaacggcagcttgccgcgcctgcgctacaacccaaactcgtggacaaaggtggcgcatattctttttgtggattcgccagttggggccgggttttccttctccagagatgccaaaggctacaacgctggagcggtatcaaccacgctgcacttggcgaagttcctcaacaagtggttcaacgaccatcctgagtaccatgcaaatcctttctacatcgatggagaatcatacgctggaaaaattgtaccattccttgcacagatgatttcagaaggtattggagcaggaatgaagtcggcacctcgtctcaagggctatctagtgggcaacccgtccacagaggagcgtattgatgttagcgctagagtgccttgtgctcacgggtttgggattatatcacatcagttgtatgagatgatattggggcattgccatggagaggactactccaatcctgcaaaagagttgtgtggtcaggcactgaagaccttcaatgatctcacctcggaagttgcgcaaggccatgtactgcaggagaaatgcgtcgcggcgtcgtcgtctcctgtgctgaacgcaaacagcagggtggccggcggctcgtcgtcgtgggcctcagatggcaggaagatcctacgggaggaagaaatggtgggacgacgcggagtactgggcaagctatttcatcccccggcattaccgcccttttcatgcagagtttaccggtactacctgtcgtatttctgggcaaacgacaggcgcacccgggatgctcttgggatcaaggagggcaccgtggatgagtgggtcagatgccacaacgacgaccaagagttgccttacgagagcgagctgaagagtgtcgtcaagtaccaccggaacctgacgtccagaggctaccgagccatggtatacagcggcgaccatgacctgctggtgccacatctgggcacccaggcctgggtcaggtcgctcaacttccccgtcgtggacgactggagggcgtggcatctcggtggccagtcagctggatttacaataacttactcaaacaacatgacattcgcgacgatcaagggcgccgggcatacagcacctgagtacgagccggagaggtgtttcgccatgttcagccgttggatcctcaaccggccactc

SEQ ID NO: 766 - DNA, 720 bp, Artificial sequence
  miRNA-Resistant target example
atggggaggggaaagatcgtgatccgcaggatcgataactccacgagccggcaggtgaccttctccaagcgccggaacgggatcttcaagaaggccaaggagctcgccatcctctgcgatgcggaggtcggcctcgtcatcttctccagcaccggccgcctctacgagtactctagcaccagcatgaaatcagttatagatcggtacggcaaggccaaggaagagcagcaagacgtcgcaaatcccaactcggagcttaagttttggcaaagggaggcagcaagcttgcgccagcagttacataatctacaagaaaattatcggcagttgacgggagatgatctttctgggctgaatgtcaaagaactgcagtccctggagaatcaattggaaacaagcctgcgtggtgtccgcgcaaagaaggaccatctcttgatagatgagattcacgatttgaatcgaaaggcaagtttatttcaccaagaaaatacagacttgtacaataagatcaacctgattcgccaagaaaatgatgagttacataaaaagatctatgagactgaaggaccaagtggagttaatcgggagtcaccgactccattcaactttgcagtagtagaaaccagagatgttccagtgcaacttgaactcagcacactgccacaacaaaataacattgagccatctactgctcctaagctaggattgcaattaattcca

SEQ ID NO: 767 - DNA, 720 bp, Artificial sequence
  miRNA-Resistant target example
atggggaggggaaagatcgtgatccgcaggatcgataactccacgagccggcaggtgaccttctccaagcgccggaacgggatcttcaagaaggccaaggagctcgccatcctctgcgatgcggaggtcggcctcgtcatcttctccagcaccggccgcctctacgagtactctagcaccagcatgaaatcagttatagatcggtacggcaaggccaaggaagagcagcaagacgtcgcaaatcccaactcggagcttaagttttggcaaagggaggcagcaagcttgagacagcagttacataatctacaagaaaattatcggcagttgacgggagatgatctttctgggctgaatgtcaaagaactgcagtccctggagaatcaattggaaacaagcctgcgtggtgtccgcgcaaagaaggaccatctcttgatagatgagattcacgatttgaatcgaaaggcaagtttatttcaccaagaaaatacagacttgtacaataagatcaacctgattcgccaagaaaatgatgagttacataaaaagatctatgagactgaaggaccaagtggagttaatcgggagtcaccgactccattcaactttgcagtagtagaaaccagagatgttccagtgcaacttgaactcagcacactgccacaacaaaataacattgagccatctactgctcctaagctaggattgcaattaattcca

SEQ ID NO: 768 - DNA, 720 bp, Artificial sequence; identical to SEQ ID NO: 767
  miRNA-Resistant target example

SEQ ID NO: 769 - DNA, 720 bp, Artificial sequence; identical to SEQ ID NO: 767
  miRNA-Resistant target example

SEQ ID NO: 770 - DNA, 720 bp, Artificial sequence; identical to SEQ ID NO: 767
  miRNA-Resistant target example

SEQ ID NO: 771 - DNA, 720 bp, Artificial sequence
  miRNA-Resistant target example
atggggagggggaagattgtgatccgccggatcgacaactcgacgagccggcaggtgacgttctcgaagcggaggaacgggatcttcaagaaggccaaggagctggccatcctctgcgacgccgaggtcggcctcatgatcttctccagcaccggccgcctctacgagtactccagcaccagcatgaagtcagttatagatcggtatggcaagtccaaggatgagcagcaagccgtcgcaaatcccaactcggagcttaagttttggcaaagggaggcagcaagcttgcgccagcagttacataatctacaagaaaatcatcggcagttgatgggcgaagatctatctgggctgaatgttaaggaattgcaatctctagagaatcagctggaaataagtctacgtagtgtccgtacaaagaaggaccacgtcttgattgatgaaattcatgaactgaatcggaagggaagtctagttcaccaagaaaacatggaattatacaagaagatcagtttaattcgtcaagaaaatgctgagttatataagaagatctacgagactgaaggaccaagtgaagtcaatcgggattcaccaactccttacaattttgcagtaattgaaaaaacaaatgttcctgtgcaacttggactcagcacactaccacaacatagtgacgccgaacaatcaactgctcctaagctagggttacagttgaatcca

SEQ ID NO: 772 - DNA, 720 bp, Artificial sequence
  miRNA-Resistant target example
atggggagggggaagattgtgatccgccggatcgacaactcgacgagccggcaggtgacgttctcgaagcggaggaacgggatcttcaagaaggccaaggagctggccatcctctgcgacgccgaggtcggcctcatgatcttctccagcaccggccgcctctacgagtactccagcaccagcatgaagtcagttatagatcggtatggcaagtccaaggatgagcagcaagccgtcgcaaatcccaactcggagcttaagttttggcaaagggaggcagcaagcttgagacagcagttacataatctacaagaaaatcatcggcagttgatgggcgaagatctatctgggctgaatgttaaggaattgcaatctctagagaatcagctggaaataagtctacgtagtgtccgtacaaagaaggaccacgtcttgattgatgaaattcatgaactgaatcggaagggaagtctagttcaccaagaaaacatggaattatacaagaagatcagtttaattcgtcaagaaaatgctgagttatataagaagatctacgagactgaaggaccaagtgaagtcaatcgggattcaccaactccttacaattttgcagtaattgaaaaaacaaatgttcctgtgcaacttggactcagcacactaccacaacatagtgacgccgaacaatcaactgctcctaagctagggttacagttgaatcca

SEQ ID NO: 773 - DNA, 720 bp, Artificial sequence; identical to SEQ ID NO: 772
  miRNA-Resistant target example

SEQ ID NO: 774 - DNA, 720 bp, Artificial sequence; identical to SEQ ID NO: 772
  miRNA-Resistant target example

SEQ ID NO: 775 - DNA, 720 bp, Artificial sequence; identical to SEQ ID NO: 772
  miRNA-Resistant target example

SEQ ID NO: 776 - DNA, 2217 bp, Artificial sequence
  miRNA-Resistant target example
atggcggggatcgacctcaacgacaccgtggaggaggacgaggaggaggcggagcccggcaaccccgcctgctcccagcaaagccggaccagctccgcggccacgcccccacccccgccgctgaccccgctgctccagccgaggccgggcgccgcggtgtgcctcgagctctggcacgcctgcgccggccccgtcgcgccgctgccgcggaaagggaccgtcgtcgtctacctcccgcagggacacctggagcacctcggtgacgccgccgcggccgcagccggaggcgcgccggcgcccgccgccctgccgccccacgtcttctgccgcgtcgtcgacgtcactctccatgcggacgcgtccacggacgaggtgtacgcccagctcgccctcgtcgccgagaacgaggatgtcgcgaggcggctgcgcggagggtccgaggacgggagcgctggggacggcgacgacggggaggccgtgaagcagcggttctcgcggatgccgcacatgttctgcaagacgctcacggcctccgacaccagcacgcacggcggcttctccgtgccgcgccgcgccgccgaggactgcttcccgcctctggactacagccagcagcggccgtcgcaggagcttgtcgccaaggatttgcacggaaccgagtggaggttccgccacatttatcgaggccagccccgcaggcaccttttaaccactggatggagtgcatttgtcaacaagaagaagcttgtctcaggggacgctgtactatttttgagaggtgatgatggggagctaagacttggagtgcgccgtgcagctcagcttaaaaatggatctgcttttccagctctttataatcagtgttctaatcttggttcactagctaacgtagcacatgctgtggccacaaaaagcgtgttccacatctactacaaccccagattaagccaatctgaattcattataccgtattcaaagtttatgaagagcttcagtcaacaattttctgctggtttgaggttcaaaatgagatatgagagtgatgatgcttctgaaagaagatgcactggggtaatagcaggaattggtgatgctgaccccatgtggcgtggttcgaagtggaaatgtttgatggtccgatgggatgatgatgtagattttcgtcgaccgaacaggatttctccttgggagattgagctgactagttcagtttcaggatcccatctgtctgcaccaaatgcaaagagactcaaaccatgtcttcccccggactacctagttccaaatggaagtggttgtcctgattttgcggaatctgcccaattccacaaagtactacagggacaggagttattgggttatagaactcgtgacaatgctgctgttgcaacttctcagccatgtgaagcaaggaacatgcagtacattgatgagcgaagttgctccaataatgtgagtaacagtatcccaggggttcctagaattggtgtcagaacaccactaggaaaccctaggttttcctaccattgctcaggctttggggagtctccaagattccaaaaggtcttgcaaggtcaagaagtatttcaaccctaccgaggaactctagtcgatccaagtttgagaaatagtggctttcatcagcaagatggttctcatgtgcctactcaagcgaataagtggcatccacagcttcatgggtgtgcttttcgtgggacacaagcaccagctattccatctcaatcctcatcgccaccatctgtcctaatgtttcaacgagataatccaaagatgtccccttttgaatttgggcattgtcacatggataagaatgaggatatgcgtgcaatgtttggccatgctggaggtattggaagaactgagcaaacaatgatgctccaggctcataatgtttctggaggaatgggaaatagagatgtgaccgttgagaaatttcagcccactgttgctgttggaagggatggatcagacaacagggaagttaccaaaaatagttgcaaaatatttggcatatctttgactgagaaggttccagcaatcaaagaaaaggactgtggtgataccaactatccatcccccttcctgtctttgaagcaacacgtgccaaaatcgctgggcaacagttgtgccactattcatgagcagaggcctgttgttggtagggtgattgatgtttcaacagtggatatgatgatc

SEQ ID NO: 777 - DNA, 2217 bp, Artificial sequence
  miRNA-Resistant target example
atggcggggatcgacctcaacgacaccgtggaggaggacgaggaggaggcggagcccggcaaccccgcctgctcccagcaaagccggaccagctccgcggccacgcccccacccccgccgctgaccccgctgctccagccgaggccgggcgccgcggtgtgcctcgagctctggcacgcctgcgccggccccgtcgcgccgctgccgcggaaagggaccgtcgtcgtctacctcccgcagggacacctggagcacctcggtgacgccgccgcggccgcagccggaggcgcgccggcgcccgccgccctgccgccccacgtcttctgccgcgtcgtcgacgtcactctccatgcggacgcgtccacggacgaggtgtacgcccagctcgccctcgtcgccgagaacgaggatgtcgcgaggcggctgcgcggagggtccgaggacgggagcgctggggacggcgacgacggggaggccgtgaagcagcggttctcgcggatgccgcacatgttctgcaagacgctcacggcctccgacaccagcacgcacggcggcttctccgtgccgcgccgcgccgccgaggactgcttcccgcctctggactacagccagcagcggccgtcgcaggagcttgtcgccaaggatttgcacggaaccgagtggaggttccgccacatttatcgaggccagccccgcaggcaccttttaaccactggatggagtgcatttgtcaacaagaagaagcttgtctcaggggacgctgtactatttttgagaggtgatgatggggagctaagacttggagtgcgccgtgcagctcagcttaaaaatggatctgcttttccagctctttataatcagtgttctaatcttggttcactagctaacgtagcacatgctgtggccacaaaaagcgtgttccacatctactacaaccccagattaagccaatctgaattcattataccgtattcaaagtttatgaagagcttcagtcaacaattttctgctggtttgaggttcaaaatgagatatgagagtgatgatgcttctgaaagaagatgcactggggtaatagcaggaattggtgatgctgaccccatgtggcgtggttcgaagtggaaatgtttgatggtccgatgggatgatgatgtagattttcgtcgaccgaacaggatttctccttgggagattgagctgactagttcagtttcaggatcccatctgtctgcaccaaatgcaaagagactcaaaccatgtcttcccccggactacctagttccaaatggaagtggttgtcctgattttgcggaatctgcccaattccacaaggtactacagggacaggagttattgggttatagaactcgtgacaatgctgctgttgcaacttctcagccatgtgaagcaaggaacatgcagtacattgatgagcgaagttgctccaataatgtgagtaacagtatcccaggggttcctagaattggtgtcagaacaccactaggaaaccctaggttttcctaccattgctcaggctttggggagtctccaagattccaaaaggtcttgcaaggtcaagaagtatttcaaccctaccgaggaactctagtcgatccaagtttgagaaatagtggctttcatcagcaagatggttctcatgtgcctactcaagcgaataagtggcatccacagcttcatgggtgtgcttttcgtgggacacaagcaccagctattccatctcaatcctcatcgccaccatctgtcctaatgtttcaacgagataatccaaagatgtccccttttgaatttgggcattgtcacatggataagaatgaggatatgcgtgcaatgtttggccatgctggaggtattggaagaactgagcaaacaatgatgctccaggctcataatgtttctggaggaatgggaaatagagatgtgaccgttgagaaatttcagcccactgttgctgttggaagggatggatcagacaacagggaagttaccaaaaatagttgcaaaatatttggcatatctttgactgagaaggttccagcaatcaaagaaaaggactgtggtgataccaactatccatcccccttcctgtctttgaagcaacacgtgccaaaatcgctgggcaacagttgtgccactattcatgagcagaggcctgttgttggtagggtgattgatgtttcaacagtggatatgatgatc

SEQ ID NO: 778 - DNA, 2217 bp, Artificial sequence
  miRNA-Resistant target example
atggcggggatcgacctcaacgacaccgtggaggaggacgaggaggaggcggagcccggcaaccccgcctgctcccagcaaagccggaccagctccgcggccacgcccccacccccgccgctgaccccgctgctccagccgaggccgggcgccgcggtgtgcctcgagctctggcacgcctgcgccggccccgtcgcgccgctgccgcggaaagggaccgtcgtcgtctacctcccgcagggacacctggagcacctcggtgacgccgccgcggccgcagccggaggcgcgccggcgcccgccgccctgccgccccacgtcttctgccgcgtcgtcgacgtcactctccatgcggacgcgtccacggacgaggtgtacgcccagctcgccctcgtcgccgagaacgaggatgtcgcgaggcggctgcgcggagggtccgaggacgggagcgctggggacggcgacgacggggaggccgtgaagcagcggttctcgcggatgccgcacatgttctgcaagacgctcacggcctccgacaccagcacgcacggcggcttctccgtgccgcgccgcgccgccgaggactgcttcccgcctctggactacagccagcagcggccgtcgcaggagcttgtcgccaaggatttgcacggaaccgagtggaggttccgccacatttatcgaggccagccccgcaggcaccttttaaccactggatggagtgcatttgtcaacaagaagaagcttgtctcaggggacgctgtactatttttgagaggtgatgatggggagctaagacttggagtgcgccgtgcagctcagcttaaaaatggatctgcttttccagctctttataatcagtgttctaatcttggttcactagctaacgtagcacatgctgtggccacaaaaagcgtgttccacatctactacaaccccagattaagccaatctgaattcattataccgtattcaaagtttatgaagagcttcagtcaacaattttctgctggtttgaggttcaaaatgagatatgagagtgatgatgcttctgaaagaagatgcactggggtaatagcaggaattggtgatgctgaccccatgtggcgtggttcgaagtggaaatgtttgatggtccgatgggatgatgatgtagattttcgtcgaccgaacaggatttctccttgggagattgagctgactagttcagtttcaggatcccatctgtctgcaccaaatgcaaagagactcaaaccatgtcttcccccggactacctagttccaaatggaagtggttgtcctgattttgcggaatctgcccaattccacaaagtcctacagggacaggagttattgggttatagaactcgtgacaatgctgctgttgcaacttctcagccatgtgaagcaaggaacatgcagtacattgatgagcgaagttgctccaataatgtgagtaacagtatcccaggggttcctagaattggtgtcagaacaccactaggaaaccctaggttttcctaccattgctcaggctttggggagtctccaagattccaaaaggtcttgcaaggtcaagaagtatttcaaccctaccgaggaactctagtcgatccaagtttgagaaatagtggctttcatcagcaagatggttctcatgtgcctactcaagcgaataagtggcatccacagcttcatgggtgtgcttttcgtgggacacaagcaccagctattccatctcaatcctcatcgccaccatctgtcctaatgtttcaacgagataatccaaagatgtccccttttgaatttgggcattgtcacatggataagaatgaggatatgcgtgcaatgtttggccatgctggaggtattggaagaactgagcaaacaatgatgctccaggctcataatgtttctggaggaatgggaaatagagatgtgaccgttgagaaatttcagcccactgttgctgttggaagggatggatcagacaacagggaagttaccaaaaatagttgcaaaatatttggcatatctttgactgagaaggttccagcaatcaaagaaaaggactgtggtgataccaactatccatcccccttcctgtctttgaagcaacacgtgccaaaatcgctgggcaacagttgtgccactattcatgagcagaggcctgttgttggtagggtgattgatgtttcaacagtggatatgatgatc

SEQ ID NO: 779 - DNA, 2217 bp, Artificial sequence
  miRNA-Resistant target example
atggcggggatcgacctcaacgacaccgtggaggaggacgaggaggaggcggagcccggcaaccccgcctgctcccagcaaagccggaccagctccgcggccacgcccccacccccgccgctgaccccgctgctccagccgaggccgggcgccgcggtgtgcctcgagctctggcacgcctgcgccggccccgtcgcgccgctgccgcggaaagggaccgtcgtcgtctacctcccgcagggacacctggagcacctcggtgacgccgccgcggccgcagccggaggcgcgccggcgcccgccgccctgccgccccacgtcttctgccgcgtcgtcgacgtcactctccatgcggacgcgtccacggacgaggtgtacgcccagctcgccctcgtcgccgagaacgaggatgtcgcgaggcggctgcgcggagggtccgaggacgggagcgctggggacggcgacgacggggaggccgtgaagcagcggttctcgcggatgccgcacatgttctgcaagacgctcacggcctccgacaccagcacgcacggcggcttctccgtgccgcgccgcgccgccgaggactgcttcccgcctctggactacagccagcagcggccgtcgcaggagcttgtcgccaaggatttgcacggaaccgagtggaggttccgccacatttatcgaggccagccccgcaggcaccttttaaccactggatggagtgcatttgtcaacaagaagaagcttgtctcaggggacgctgtactatttttgagaggtgatgatggggagctaagacttggagtgcgccgtgcagctcagcttaaaaatggatctgcttttccagctctttataatcagtgttctaatcttggttcactagctaacgtagcacatgctgtggccacaaaaagcgtgttccacatctactacaaccccagattaagccaatctgaattcattataccgtattcaaagtttatgaagagcttcagtcaacaattttctgctggtttgaggttcaaaatgagatatgagagtgatgatgcttctgaaagaagatgcactggggtaatagcaggaattggtgatgctgaccccatgtggcgtggttcgaagtggaaatgtttgatggtccgatgggatgatgatgtagattttcgtcgaccgaacaggatttctccttgggagattgagctgactagttcagtttcaggatcccatctgtctgcaccaaatgcaaagagactcaaaccatgtcttcccccggactacctagttccaaatggaagtggttgtcctgattttgcggaatctgcccaattccacaaagtattgcagggacaggagttattgggttatagaactcgtgacaatgctgctgttgcaacttctcagccatgtgaagcaaggaacatgcagtacattgatgagcgaagttgctccaataatgtgagtaacagtatcccaggggttcctagaattggtgtcagaacaccactaggaaaccctaggttttcctaccattgctcaggctttggggagtctccaagattccaaaaggtcttgcaaggtcaagaagtatttcaaccctaccgaggaactctagtcgatccaagtttgagaaatagtggctttcatcagcaagatggttctcatgtgcctactcaagcgaataagtggcatccacagcttcatgggtgtgcttttcgtgggacacaagcaccagctattccatctcaatcctcatcgccaccatctgtcctaatgtttcaacgagataatccaaagatgtccccttttgaatttgggcattgtcacatggataagaatgaggatatgcgtgcaatgtttggccatgctggaggtattggaagaactgagcaaacaatgatgctccaggctcataatgtttctggaggaatgggaaatagagatgtgaccgttgagaaatttcagcccactgttgctgttggaagggatggatcagacaacagggaagttaccaaaaatagttgcaaaatatttggcatatctttgactgagaaggttccagcaatcaaagaaaaggactgtggtgataccaactatccatcccccttcctgtctttgaagcaacacgtgccaaaatcgctgggcaacagttgtgccactattcatgagcagaggcctgttgttggtagggtgattgatgtttcaacagtggatatgatgatc

SEQ ID NO: 780 - DNA, 2217 bp, Artificial sequence
  miRNA-Resistant target example
atggcggggatcgacctcaacgacaccgtggaggaggacgaggaggaggcggagcccggcaaccccgcctgctcccagcaaagccggaccagctccgcggccacgcccccacccccgccgctgaccccgctgctccagccgaggccgggcgccgcggtgtgcctcgagctctggcacgcctgcgccggccccgtcgcgccgctgccgcggaaagggaccgtcgtcgtctacctcccgcagggacacctggagcacctcggtgacgccgccgcggccgcagccggaggcgcgccggcgcccgccgccctgccgccccacgtcttctgccgcgtcgtcgacgtcactctccatgcggacgcgtccacggacgaggtgtacgcccagctcgccctcgtcgccgagaacgaggatgtcgcgaggcggctgcgcggagggtccgaggacgggagcgctggggacggcgacgacggggaggccgtgaagcagcggttctcgcggatgccgcacatgttctgcaagacgctcacggcctccgacaccagcacgcacggcggcttctccgtgccgcgccgcgccgccgaggactgcttcccgcctctggactacagccagcagcggccgtcgcaggagcttgtcgccaaggatttgcacggaaccgagtggaggttccgccacatttatcgaggccagccccgcaggcaccttttaaccactggatggagtgcatttgtcaacaagaagaagcttgtctcaggggacgctgtactatttttgagaggtgatgatggggagctaagacttggagtgcgccgtgcagctcagcttaaaaatggatctgcttttccagctctttataatcagtgttctaatcttggttcactagctaacgtagcacatgctgtggccacaaaaagcgtgttccacatctactacaaccccagattaagccaatctgaattcattataccgtattcaaagtttatgaagagcttcagtcaacaattttctgctggtttgaggttcaaaatgagatatgagagtgatgatgcttctgaaagaagatgcactggggtaatagcaggaattggtgatgctgaccccatgtggcgtggttcgaagtggaaatgtttgatggtccgatgggatgatgatgtagattttcgtcgaccgaacaggatttctccttgggagattgagctgactagttcagtttcaggatcccatctgtctgcaccaaatgcaaagagactcaaaccatgtcttcccccggactacctagttccaaatggaagtggttgtcctgattttgcggaatctgcccaattccacaaagtactacaaggacaagagttattgggttatagaactcgtgacaatgctgctgttgcaacttctcagccatgtgaagcaaggaacatgcagtacattgatgagcgaagttgctccaataatgtgagtaacagtatcccaggggttcctagaattggtgtcagaacaccactaggaaaccctaggttttcctaccattgctcaggctttggggagtctccaagattccaaaaggtcttgcaaggtcaagaagtatttcaaccctaccgaggaactctagtcgatccaagtttgagaaatagtggctttcatcagcaagatggttctcatgtgcctactcaagcgaataagtggcatccacagcttcatgggtgtgcttttcgtgggacacaagcaccagctattccatctcaatcctcatcgccaccatctgtcctaatgtttcaacgagataatccaaagatgtccccttttgaatttgggcattgtcacatggataagaatgaggatatgcgtgcaatgtttggccatgctggaggtattggaagaactgagcaaacaatgatgctccaggctcataatgtttctggaggaatgggaaatagagatgtgaccgttgagaaatttcagcccactgttgctgttggaagggatggatcagacaacagggaagttaccaaaaatagttgcaaaatatttggcatatctttgactgagaaggttccagcaatcaaagaaaaggactgtggtgataccaactatccatcccccttcctgtctttgaagcaacacgtgccaaaatcgctgggcaacagttgtgccactattcatgagcagaggcctgttgttggtagggtgattgatgtttcaacagtggatatgatgatc

SEQ ID NO: 781 - DNA, 2040 bp, Artificial sequence
  miRNA-Resistant target example
atggggattgatctcaacgccgtgggggaggacgacccggcgggcgcggtgtgcccggagctgtggcacgcgtgcgcgggggctggagtggcgctgccgcggcggggcagcgccgtggtgtacctgcctcaggcgcacctcgcggcgggcggctgcgacggtggtggggggttggcgccggccccgccgcgcgtgccgccgcacgtggtgtgtcgcgtcgtcgacgtcgagctacgcgcggatgcggccacggacgaggtgtacgcgcggcttgcgctggtggcgatggatacgatgtttggccgaaacatcaatgatggtgaaactgaagagaagaatggcgaggaagaggatggcgacggagaaaagaagcacgcatcacacatgttctgcaagacactcacagcttctgataccagcacacatgggggattctctgttccacggcgagctgcagaggactgctttccaccattggactatgagcagcttaggccttcccaagagcttattgccaaggatttgcatggcatgaaatggaggttccgtcatatctatagaggtcaacctcgaaggcatcttctgacaactggatggagttcatttatcaataagaagaaactagtctcaggggatgcagtcttgtttcttagaggtaatgatggtgagctaagattgggtgtgaggagagcagttcaactgaaaaatgaagctctacttgaagctgtcaactgtactgattcgaagctacttatgctgtctgctgtggccaattctttggacaacagaagtatatttcacatctgtttcaacccaagggttggtgcatcagaatttattgtgccgtattgcaagttcttgaagagcttgaactatcacttttcagttggaaccagatttaaagttggctgcgagaatgaagatgctaacgagaggtcctttggattgatcataggtattagtgaagttgatcccatacactggcctggatcaaaatggaaatctctcctgataaagtgggatggtgctactaagtacagccaccagaatagagtatctccatgggacatcgagggagttggcagctcagtttcagttactcaccgactttcctcttctgtttcgaagcgaacaaaactgtgcttccctccaagcgatttggacacgccaattctagatggaaacggtcgtccagactcagtggaaactgaacgtttccacagggtcttgcaaggtcaagaattggtgcactctagtattcatggtactgcatgctctcattcatcagatagccccagatgtcaaggctcttatggcaggagattctctgctgatgcgtggaactgcaagatgaatgatgtaatgagtgggcctcgacacctaaatgccactgggtttgcttaccagcccctaggcttcagtgaatctgtcaaattctcagaagtactacagggacaggagatgtctcaggcggttccttccttcatgagatctgctttcaactctggcacgcagaatggcagggttcgaccatttgattatgtgcagagatcagatgcaactcaaggatacgctctccagcagtttaatctgccagcaacagaagtgcattcgccctcttctgttcttatgtttaaccaaaccatggtaccacatgctgagctagatggtgcgaccaaccgtgaagaagtacatggcagcaggtacttgtcatccaatgcaatagggagagaagctgaaccatggccatccatgcagcagcaaagagcgagtgtaaatggaagcgagcctctcgacacaactgaagcctcagctcctgcaaggaacgctgaatctggatcggtcggcaggggcgcggggcgaagcaactgtaagctttttggtttctccctgactgagaagatccttggaacggatggtggtggtgtgaaagaagggaactacgaagtggaccgtcaaactccccgggtgctagacttgtttgggcacggttctacgcctggagctctgcatgctctctgtgctgctcccttgggaata

SEQ ID NO: 782 - DNA, 2040 bp, Artificial sequence
  miRNA-Resistant target example
atggggattgatctcaacgccgtgggggaggacgacccggcgggcgcggtgtgcccggagctgtggcacgcgtgcgcgggggctggagtggcgctgccgcggcggggcagcgccgtggtgtacctgcctcaggcgcacctcgcggcgggcggctgcgacggtggtggggggttggcgccggccccgccgcgcgtgccgccgcacgtggtgtgtcgcgtcgtcgacgtcgagctacgcgcggatgcggccacggacgaggtgtacgcgcggcttgcgctggtggcgatggatacgatgtttggccgaaacatcaatgatggtgaaactgaagagaagaatggcgaggaagaggatggcgacggagaaaagaagcacgcatcacacatgttctgcaagacactcacagcttctgataccagcacacatgggggattctctgttccacggcgagctgcagaggactgctttccaccattggactatgagcagcttaggccttcccaagagcttattgccaaggatttgcatggcatgaaatggaggttccgtcatatctatagaggtcaacctcgaaggcatcttctgacaactggatggagttcatttatcaataagaagaaactagtctcaggggatgcagtcttgtttcttagaggtaatgatggtgagctaagattgggtgtgaggagagcagttcaactgaaaaatgaagctctacttgaagctgtcaactgtactgattcgaagctacttatgctgtctgctgtggccaattctttggacaacagaagtatatttcacatctgtttcaacccaagggttggtgcatcagaatttattgtgccgtattgcaagttcttgaagagcttgaactatcacttttcagttggaaccagatttaaagttggctgcgagaatgaagatgctaacgagaggtcctttggattgatcataggtattagtgaagttgatcccatacactggcctggatcaaaatggaaatctctcctgataaagtgggatggtgctactaagtacagccaccagaatagagtatctccatgggacatcgagggagttggcagctcagtttcagttactcaccgactttcctcttctgtttcgaagcgaacaaaactgtgcttccctccaagcgatttggacacgccaattctagatggaaacggtcgtccagactcagtggaaactgaacgtttccacagggtcttgcaaggtcaagaattggtgcactctagtattcatggtactgcatgctctcattcatcagatagccccagatgtcaaggctcttatggcaggagattctctgctgatgcgtggaactgcaagatgaatgatgtaatgagtgggcctcgacacctaaatgccactgggtttgcttaccagcccctaggcttcagtgaatctgtcaaattctcagaggtactacagggacaggagatgtctcaggcggttccttccttcatgagatctgctttcaactctggcacgcagaatggcagggttcgaccatttgattatgtgcagagatcagatgcaactcaaggatacgctctccagcagtttaatctgccagcaacagaagtgcattcgccctcttctgttcttatgtttaaccaaaccatggtaccacatgctgagctagatggtgcgaccaaccgtgaagaagtacatggcagcaggtacttgtcatccaatgcaatagggagagaagctgaaccatggccatccatgcagcagcaaagagcgagtgtaaatggaagcgagcctctcgacacaactgaagcctcagctcctgcaaggaacgctgaatctggatcggtcggcaggggcgcggggcgaagcaactgtaagctttttggtttctccctgactgagaagatccttggaacggatggtggtggtgtgaaagaagggaactacgaagtggaccgtcaaactccccgggtgctagacttgtttgggcacggttctacgcctggagctctgcatgctctctgtgctgctcccttgggaata

SEQ ID NO: 783 - DNA, 2040 bp, Artificial sequence
  miRNA-Resistant target example
atggggattgatctcaacgccgtgggggaggacgacccggcgggcgcggtgtgcccggagctgtggcacgcgtgcgcgggggctggagtggcgctgccgcggcggggcagcgccgtggtgtacctgcctcaggcgcacctcgcggcgggcggctgcgacggtggtggggggttggcgccggccccgccgcgcgtgccgccgcacgtggtgtgtcgcgtcgtcgacgtcgagctacgcgcggatgcggccacggacgaggtgtacgcgcggcttgcgctggtggcgatggatacgatgtttggccgaaacatcaatgatggtgaaactgaagagaagaatggcgaggaagaggatggcgacggagaaaagaagcacgcatcacacatgttctgcaagacactcacagcttctgataccagcacacatgggggattctctgttccacggcgagctgcagaggactgctttccaccattggactatgagcagcttaggccttcccaagagcttattgccaaggatttgcatggcatgaaatggaggttccgtcatatctatagaggtcaacctcgaaggcatcttctgacaactggatggagttcatttatcaataagaagaaactagtctcaggggatgcagtcttgtttcttagaggtaatgatggtgagctaagattgggtgtgaggagagcagttcaactgaaaaatgaagctctacttgaagctgtcaactgtactgattcgaagctacttatgctgtctgctgtggccaattctttggacaacagaagtatatttcacatctgtttcaacccaagggttggtgcatcagaatttattgtgccgtattgcaagttcttgaagagcttgaactatcacttttcagttggaaccagatttaaagttggctgcgagaatgaagatgctaacgagaggtcctttggattgatcataggtattagtgaagttgatcccatacactggcctggatcaaaatggaaatctctcctgataaagtgggatggtgctactaagtacagccaccagaatagagtatctccatgggacatcgagggagttggcagctcagtttcagttactcaccgactttcctcttctgtttcgaagcgaacaaaactgtgcttccctccaagcgatttggacacgccaattctagatggaaacggtcgtccagactcagtggaaactgaacgtttccacagggtcttgcaaggtcaagaattggtgcactctagtattcatggtactgcatgctctcattcatcagatagccccagatgtcaaggctcttatggcaggagattctctgctgatgcgtggaactgcaagatgaatgatgtaatgagtgggcctcgacacctaaatgccactgggtttgcttaccagcccctaggcttcagtgaatctgtcaaattctcagaagtcctacagggacaggagatgtctcaggcggttccttccttcatgagatctgctttcaactctggcacgcagaatggcagggttcgaccatttgattatgtgcagagatcagatgcaactcaaggatacgctctccagcagtttaatctgccagcaacagaagtgcattcgccctcttctgttcttatgtttaaccaaaccatggtaccacatgctgagctagatggtgcgaccaaccgtgaagaagtacatggcagcaggtacttgtcatccaatgcaatagggagagaagctgaaccatggccatccatgcagcagcaaagagcgagtgtaaatggaagcgagcctctcgacacaactgaagcctcagctcctgcaaggaacgctgaatctggatcggtcggcaggggcgcggggcgaagcaactgtaagctttttggtttctccctgactgagaagatccttggaacggatggtggtggtgtgaaagaagggaactacgaagtggaccgtcaaactccccgggtgctagacttgtttgggcacggttctacgcctggagctctgcatgctctctgtgctgctcccttgggaata

SEQ ID NO: 784 - DNA, 2040 bp, Artificial sequence
  miRNA-Resistant target example
atggggattgatctcaacgccgtgggggaggacgacccggcgggcgcggtgtgcccggagctgtggcacgcgtgcgcgggggctggagtggcgctgccgcggcggggcagcgccgtggtgtacctgcctcaggcgcacctcgcggcgggcggctgcgacggtggtggggggttggcgccggccccgccgcgcgtgccgccgcacgtggtgtgtcgcgtcgtcgacgtcgagctacgcgcggatgcggccacggacgaggtgtacgcgcggcttgcgctggtggcgatggatacgatgtttggccgaaacatcaatgatggtgaaactgaagagaagaatggcgaggaagaggatggcgacggagaaaagaagcacgcatcacacatgttctgcaagacactcacagcttctgataccagcacacatgggggattctctgttccacggcgagctgcagaggactgctttccaccattggactatgagcagcttaggccttcccaagagcttattgccaaggatttgcatggcatgaaatggaggttccgtcatatctatagaggtcaacctcgaaggcatcttctgacaactggatggagttcatttatcaataagaagaaactagtctcaggggatgcagtcttgtttcttagaggtaatgatggtgagctaagattgggtgtgaggagagcagttcaactgaaaaatgaagctctacttgaagctgtcaactgtactgattcgaagctacttatgctgtctgctgtggccaattctttggacaacagaagtatatttcacatctgtttcaacccaagggttggtgcatcagaatttattgtgccgtattgcaagttcttgaagagcttgaactatcacttttcagttggaaccagatttaaagttggctgcgagaatgaagatgctaacgagaggtcctttggattgatcataggtattagtgaagttgatcccatacactggcctggatcaaaatggaaatctctcctgataaagtgggatggtgctactaagtacagccaccagaatagagtatctccatgggacatcgagggagttggcagctcagtttcagttactcaccgactttcctcttctgtttcgaagcgaacaaaactgtgcttccctccaagcgatttggacacgccaattctagatggaaacggtcgtccagactcagtggaaactgaacgtttccacagggtcttgcaaggtcaagaattggtgcactctagtattcatggtactgcatgctctcattcatcagatagccccagatgtcaaggctcttatggcaggagattctctgctgatgcgtggaactgcaagatgaatgatgtaatgagtgggcctcgacacctaaatgccactgggtttgcttaccagcccctaggcttcagtgaatctgtcaaattctcagaagtattgcagggacaggagatgtctcaggcggttccttccttcatgagatctgctttcaactctggcacgcagaatggcagggttcgaccatttgattatgtgcagagatcagatgcaactcaaggatacgctctccagcagtttaatctgccagcaacagaagtgcattcgccctcttctgttcttatgtttaaccaaaccatggtaccacatgctgagctagatggtgcgaccaaccgtgaagaagtacatggcagcaggtacttgtcatccaatgcaatagggagagaagctgaaccatggccatccatgcagcagcaaagagcgagtgtaaatggaagcgagcctctcgacacaactgaagcctcagctcctgcaaggaacgctgaatctggatcggtcggcaggggcgcggggcgaagcaactgtaagctttttggtttctccctgactgagaagatccttggaacggatggtggtggtgtgaaagaagggaactacgaagtggaccgtcaaactccccgggtgctagacttgtttgggcacggttctacgcctggagctctgcatgctctctgtgctgctcccttgggaata

SEQ ID NO: 785 - DNA, 2040 bp, Artificial sequence
  miRNA-Resistant target example
atggggattgatctcaacgccgtgggggaggacgacccggcgggcgcggtgtgcccggagctgtggcacgcgtgcgcgggggctggagtggcgctgccgcggcggggcagcgccgtggtgtacctgcctcaggcgcacctcgcggcgggcggctgcgacggtggtggggggttggcgccggccccgccgcgcgtgccgccgcacgtggtgtgtcgcgtcgtcgacgtcgagctacgcgcggatgcggccacggacgaggtgtacgcgcggcttgcgctggtggcgatggatacgatgtttggccgaaacatcaatgatggtgaaactgaagagaagaatggcgaggaagaggatggcgacggagaaaagaagcacgcatcacacatgttctgcaagacactcacagcttctgataccagcacacatgggggattctctgttccacggcgagctgcagaggactgctttccaccattggactatgagcagcttaggccttcccaagagcttattgccaaggatttgcatggcatgaaatggaggttccgtcatatctatagaggtcaacctcgaaggcatcttctgacaactggatggagttcatttatcaataagaagaaactagtctcaggggatgcagtcttgtttcttagaggtaatgatggtgagctaagattgggtgtgaggagagcagttcaactgaaaaatgaagctctacttgaagctgtcaactgtactgattcgaagctacttatgctgtctgctgtggccaattctttggacaacagaagtatatttcacatctgtttcaacccaagggttggtgcatcagaatttattgtgccgtattgcaagttcttgaagagcttgaactatcacttttcagttggaaccagatttaaagttggctgcgagaatgaagatgctaacgagaggtcctttggattgatcataggtattagtgaagttgatcccatacactggcctggatcaaaatggaaatctctcctgataaagtgggatggtgctactaagtacagccaccagaatagagtatctccatgggacatcgagggagttggcagctcagtttcagttactcaccgactttcctcttctgtttcgaagcgaacaaaactgtgcttccctccaagcgatttggacacgccaattctagatggaaacggtcgtccagactcagtggaaactgaacgtttccacagggtcttgcaaggtcaagaattggtgcactctagtattcatggtactgcatgctctcattcatcagatagccccagatgtcaaggctcttatggcaggagattctctgctgatgcgtggaactgcaagatgaatgatgtaatgagtgggcctcgacacctaaatgccactgggtttgcttaccagcccctaggcttcagtgaatctgtcaaattctcagaagtactacaaggacaagagatgtctcaggcggttccttccttcatgagatctgctttcaactctggcacgcagaatggcagggttcgaccatttgattatgtgcagagatcagatgcaactcaaggatacgctctccagcagtttaatctgccagcaacagaagtgcattcgccctcttctgttcttatgtttaaccaaaccatggtaccacatgctgagctagatggtgcgaccaaccgtgaagaagtacatggcagcaggtacttgtcatccaatgcaatagggagagaagctgaaccatggccatccatgcagcagcaaagagcgagtgtaaatggaagcgagcctctcgacacaactgaagcctcagctcctgcaaggaacgctgaatctggatcggtcggcaggggcgcggggcgaagcaactgtaagctttttggtttctccctgactgagaagatccttggaacggatggtggtggtgtgaaagaagggaactacgaagtggaccgtcaaactccccgggtgctagacttgtttgggcacggttctacgcctggagctctgcatgctctctgtgctgctcccttgggaata

SEQ ID NO: 786 - DNA, 2106 bp, Artificial sequence
  miRNA-Resistant target example
atggcgggcattgacctcaacaccgtggaggaggaggacgaggaggaggcggaggcggaggcgccgcctgtggccgccagggccggtggtggcgccgtgtgtctggagctgtggcacgcgtgcgcgggccccgtcgcgccgctgccgcgcaagggcagcgccgtcgtgtacctgccgcagggccacctcgagcacatcggcggcgacgctgacgcggcgggagcagcggtgccgccacacgtgctctgccgcgtcgtcgacgtcaccctccacgcggacggcgccaccgacgaggtgtacgcgcgggtgtcgctgctgcccgaggacgaggaggcggagaggcgggcgcgggcgcgggttcgggaggacgaggacgcggatcgcgacggcgaggacggggccgccatgaagccgctcgcacggacgccgcacatgttctgcaagacgctcacggcctctgacaccagcacgcacggcggcttctccgtgccgcgccgcgccgccgaggactgcttcccgccgctggactacagccagcagaggccgtctcaggagctcgtggccaaggatctacacggcacggagtggaagttccgacatatctaccgaggccagccacgaaggcatctcttaaccactggatggagtgcatttgttaataagaagaagcttgtttctggcgatgcagttctgttccttcgaggtgaagatggagtgcttcgactgggagtgcgccgagcagcccagctaaaaattgtaactcctattcctgcactgcataaccagtgctcaagccagaccactctgggaaatgttgcacaagctgtggccacgaggactgttttccacatttactacaatcccaggttaagtcaatctgaattcattgtaccctattggaagttcaccagaagcttgaatcaaccaatttctgttggaatgagatgcagaatgcgatatgaaagtgacgatgcttctgaaagaaggtgcactgggataataattggaagcagagaagctgagcctatttggtatggttcaaaatggaaatgcttggtggttagatgggatgatggtatagagtgccattggcccaatagggtatctccttgggagattgaggtcacaggatcagtttcaggatctcatatgtgcgctcccaattcaaaacgtctgaaaccatgcctccctcaagttaatccggagattgtgcttccaaatggaagcgtttcttcagattttgcgggatctgtcagattccacaaggtcttgcaaggtcaagaattgttgggtttgaaaacccatgacggtactgctatttctgcttttcaggcaactgaagcaagtaatttgcagtacagtgatgaacgtagtaacatgagtaacaatatcttagggatcccaaggctcggtgttagatctccaaatggaatccctggatttccctaccattgctcaggctttggggaatctcaaagattccaaaaggtcttgcaaggtcaagaagtgtttcgtcctttccgaggaggatgtttggctgatggccatatccgcacagcaggaatgtaccagcctaaatggcctgcaccacaagggtgtgattttccacagccagcaaaaccggtacttgtgttgcaagcatcctccccatcatctgtgctgatgtttccacaaactggttctaagataactccattggaatatgagtacagctgcctggataaggatgaggatggtagatttgataggactgtccctactcaagatatgggaagaaacaatcaaacattatctctttggcctcatcttgtttccggcgaagcaatagaagaatgtactggaactgagaatatgcactcttctgtcagtggtgcagagcatgaatcaaacaatgagagtacagttgaaaatggctgcaaaatctttggtatctcattggctgaaaagatccgatcatgtgatgaagcagactcttgtagtgcaaaacgtaattctgggctccagccttcgaggtcacaaatactaggcagctgttgggccactgttcatgagcacagatctgttgttggcagggtggttgatgtctctgcaacggatatgatgatc

SEQ ID NO: 787 - DNA, 2106 bp, Artificial sequence
  miRNA-Resistant target example
atggcgggcattgacctcaacaccgtggaggaggaggacgaggaggaggcggaggcggaggcgccgcctgtggccgccagggccggtggtggcgccgtgtgtctggagctgtggcacgcgtgcgcgggccccgtcgcgccgctgccgcgcaagggcagcgccgtcgtgtacctgccgcagggccacctcgagcacatcggcggcgacgctgacgcggcgggagcagcggtgccgccacacgtgctctgccgcgtcgtcgacgtcaccctccacgcggacggcgccaccgacgaggtgtacgcgcgggtgtcgctgctgcccgaggacgaggaggcggagaggcgggcgcgggcgcgggttcgggaggacgaggacgcggatcgcgacggcgaggacggggccgccatgaagccgctcgcacggacgccgcacatgttctgcaagacgctcacggcctctgacaccagcacgcacggcggcttctccgtgccgcgccgcgccgccgaggactgcttcccgccgctggactacagccagcagaggccgtctcaggagctcgtggccaaggatctacacggcacggagtggaagttccgacatatctaccgaggccagccacgaaggcatctcttaaccactggatggagtgcatttgttaataagaagaagcttgtttctggcgatgcagttctgttccttcgaggtgaagatggagtgcttcgactgggagtgcgccgagcagcccagctaaaaattgtaactcctattcctgcactgcataaccagtgctcaagccagaccactctgggaaatgttgcacaagctgtggccacgaggactgttttccacatttactacaatcccaggttaagtcaatctgaattcattgtaccctattggaagttcaccagaagcttgaatcaaccaatttctgttggaatgagatgcagaatgcgatatgaaagtgacgatgcttctgaaagaaggtgcactgggataataattggaagcagagaagctgagcctatttggtatggttcaaaatggaaatgcttggtggttagatgggatgatggtatagagtgccattggcccaatagggtatctccttgggagattgaggtcacaggatcagtttcaggatctcatatgtgcgctcccaattcaaaacgtctgaaaccatgcctccctcaagttaatccggagattgtgcttccaaatggaagcgtttcttcagattttgcgggatctgtcagattccacaaggtcttgcaaggtcaagaattgttgggtttgaaaacccatgacggtactgctatttctgcttttcaggcaactgaagcaagtaatttgcagtacagtgatgaacgtagtaacatgagtaacaatatcttagggatcccaaggctcggtgttagatctccaaatggaatccctggatttccctaccattgctcaggctttggggaatctcaaagattccaaaaggtcttgcaaggtcaagaagtgtttcgtcctttccgaggaggatgtttggctgatggccatatacgcacagcaggaatgtaccagcctaaatggcctgcaccacaagggtgtgattttccacagccagcaaaaccggtacttgtgttgcaagcatcctccccatcatctgtgctgatgtttccacaaactggttctaagataactccattggaatatgagtacagctgcctggataaggatgaggatggtagatttgataggactgtccctactcaagatatgggaagaaacaatcaaacattatctctttggcctcatcttgtttccggcgaagcaatagaagaatgtactggaactgagaatatgcactcttctgtcagtggtgcagagcatgaatcaaacaatgagagtacagttgaaaatggctgcaaaatctttggtatctcattggctgaaaagatccgatcatgtgatgaagcagactcttgtagtgcaaaacgtaattctgggctccagccttcgaggtcacaaatactaggcagctgttgggccactgttcatgagcacagatctgttgttggcagggtggttgatgtctctgcaacggatatgatgatc

SEQ ID NO: 788 - DNA, 2106 bp, Artificial sequence; identical to SEQ ID NO: 787
  miRNA-Resistant target example

SEQ ID NO: 789 - DNA, 2106 bp, Artificial sequence
  miRNA-Resistant target example
atggcgggcattgacctcaacaccgtggaggaggaggacgaggaggaggcggaggcggaggcgccgcctgtggccgccagggccggtggtggcgccgtgtgtctggagctgtggcacgcgtgcgcgggccccgtcgcgccgctgccgcgcaagggcagcgccgtcgtgtacctgccgcagggccacctcgagcacatcggcggcgacgctgacgcggcgggagcagcggtgccgccacacgtgctctgccgcgtcgtcgacgtcaccctccacgcggacggcgccaccgacgaggtgtacgcgcgggtgtcgctgctgcccgaggacgaggaggcggagaggcgggcgcgggcgcgggttcgggaggacgaggacgcggatcgcgacggcgaggacggggccgccatgaagccgctcgcacggacgccgcacatgttctgcaagacgctcacggcctctgacaccagcacgcacggcggcttctccgtgccgcgccgcgccgccgaggactgcttcccgccgctggactacagccagcagaggccgtctcaggagctcgtggccaaggatctacacggcacggagtggaagttccgacatatctaccgaggccagccacgaaggcatctcttaaccactggatggagtgcatttgttaataagaagaagcttgtttctggcgatgcagttctgttccttcgaggtgaagatggagtgcttcgactgggagtgcgccgagcagcccagctaaaaattgtaactcctattcctgcactgcataaccagtgctcaagccagaccactctgggaaatgttgcacaagctgtggccacgaggactgttttccacatttactacaatcccaggttaagtcaatctgaattcattgtaccctattggaagttcaccagaagcttgaatcaaccaatttctgttggaatgagatgcagaatgcgatatgaaagtgacgatgcttctgaaagaaggtgcactgggataataattggaagcagagaagctgagcctatttggtatggttcaaaatggaaatgcttggtggttagatgggatgatggtatagagtgccattggcccaatagggtatctccttgggagattgaggtcacaggatcagtttcaggatctcatatgtgcgctcccaattcaaaacgtctgaaaccatgcctccctcaagttaatccggagattgtgcttccaaatggaagcgtttcttcagattttgcgggatctgtcagattccacaaggtcttgcaaggtcaagaattgttgggtttgaaaacccatgacggtactgctatttctgcttttcaggcaactgaagcaagtaatttgcagtacagtgatgaacgtagtaacatgagtaacaatatcttagggatcccaaggctcggtgttagatctccaaatggaatccctggatttccctaccattgctcaggctttggggaatctcaaagattccaaaaggtcttgcaaggtcaagaagtgtttcgtcctttccgaggaggatgtttggctgatggccatatcagaacagcaggaatgtaccagcctaaatggcctgcaccacaagggtgtgattttccacagccagcaaaaccggtacttgtgttgcaagcatcctccccatcatctgtgctgatgtttccacaaactggttctaagataactccattggaatatgagtacagctgcctggataaggatgaggatggtagatttgataggactgtccctactcaagatatgggaagaaacaatcaaacattatctctttggcctcatcttgtttccggcgaagcaatagaagaatgtactggaactgagaatatgcactcttctgtcagtggtgcagagcatgaatcaaacaatgagagtacagttgaaaatggctgcaaaatctttggtatctcattggctgaaaagatccgatcatgtgatgaagcagactcttgtagtgcaaaacgtaattctgggctccagccttcgaggtcacaaatactaggcagctgttgggccactgttcatgagcacagatctgttgttggcagggtggttgatgtctctgcaacggatatgatgatc

SEQ ID NO: 790 - DNA, 2106 bp, Artificial sequence; identical to SEQ ID NO: 789
  miRNA-Resistant target example

SEQ ID NO: 791 - DNA, 1848 bp, Artificial sequence
  miRNA-Resistant target example
atgggcaccacagcgcggcgcgagccgctgaagcagcgcgtgaaccgctgcctcctcaagctttccgaccgcgacacagaggccatggcggccgccgagctcgaggccatcgcgcgcgcgctcgagcccgacgagctcccggccttcgtctcggccgtctccgacgcgcgccccaccgacaagaccccgctccgccgccacgcgctgcgcgccctggcgctcgtcgcggcgtcccacccgcgcgacgccgtggccccgctcgtcccgcgcatcctcgccgccgcgctccgccgcgtccgggaccaggactcctccgtccgcgccgcgctcgtcgacaccgcgcgcgccgcggcggcggcctccgcctccgcctccgccgcgctccggcccctcacggacgcgctccttcacgagcaggaccagtgcgcgcagctggcggccgcgctcgccacggccgccgccgtcgaggcgtccgccgtcaccgccgacctcgcttcctacctccacaagctccaaccgcgcctcctcaagttacttcgcagcaatgccttcaaggccaagcccgcgctcatcaccctcatcggcgcctccgcggccatggccggcgatgccgaagtcaccgcctccatcccgtgcctccgcgatgcaatcgctagcgatgactgggcagcgagaaaggcggcggcggaggcgcttgctgcattggccctggagcacacggatcttctcacgacctacaaatcctcttgcgttaccttcttcgaggcccgccgattcgataaagtaaaaatagtgcgagagtcgatgaaccggatgattgaggcgtggaaggagatcccgggtgctgaagaggacgagtgctcctccgctccgccaccagcgtcccaatcacaacgaagatcttctcttacagggagtgcaagtgatgggcgatatccagctgcttcgctgggctcaaactctgttccatcatcaacaaggaggagcagattacctgtgagcagatcatctccgcctgatgtgtcacccagtgtcaccaaaacaaatagtccttcgtccatcaggaacaagaagctgtcaccaccttcatatcgcaaagtgcgccaagcaaataattgtgactacaaggttgagattgctgttgctccggatgctaccccaatcaaagtggtgactgaggagaagctactgaaaggaggcaatgtgagagacagactggaggctaggagaacactcttccaaggcagcgaggataggtcagccaagctggctggacacaaagcagggtcacgagttgttccgtacgagggcggtggtaatttggaagagatttcagaagttgaaggtggatcagaaaggtatacagttcataaggatgagagcttgtcagaaataaggacgcagctccttcagattgaaaatcagcaaagcagtttactggatcttctccagaaatttatgggtaagtccgagaatggtatgaattctttggagacaagggtgcatgggctggagatggctttggatgagatctctcgtgatttggccttctcttcaggaaggatgtcaaacagggagcctgatgtaaagacgtgctgcattctgagtccaaaattctggagaaggcacaatggtggtaggtcttcctcaaggttttctgcctcagacccagcaaacagctcagacgagagcagaacttcttacaaatgggagagacagaagtttgggcttcagggtggctttgtcacaaacccattagccgagccaaacatttcttcagtagggaaaacaatggttactcaagaaggcaggaagaaggatacaactttacaaaagtcaaggatgggt

SEQ ID NO: 792 - DNA, 1848 bp, Artificial sequence
  miRNA-Resistant target example
atgggcaccacagcgcggcgcgagccgctgaagcagcgcgtgaaccgctgcctcctcaagctttccgaccgcgacacagaggccatggcggccgccgagctcgaggccatcgcgcgcgcgctcgagcccgacgagctcccggccttcgtctcggccgtctccgacgcgcgccccaccgacaagaccccgctccgccgccacgcgctgcgcgccctggcgctcgtcgcggcgtcccacccgcgcgacgccgtggccccgctcgtcccgcgcatcctcgccgccgcgctccgccgcgtccgggaccaggactcctccgtccgcgccgcgctcgtcgacaccgcgcgcgccgcggcggcggcctccgcctccgcctccgccgcgctccggcccctcacggacgcgctccttcacgagcaggaccagtgcgcgcagctggcggccgcgctcgccacggccgccgccgtcgaggcgtccgccgtcaccgccgacctcgcttcctacctccacaagctccaaccgcgcctcctcaagttacttcgcagcaatgccttcaaggccaagcccgcgctcatcaccctcatcggcgcctccgcggccatggccggcgatgccgaagtcaccgcctccatcccgtgcctccgcgatgcaatcgctagcgatgactgggcagcgagaaaggcggcggcggaggcgcttgctgcattggccctggagcacacggatcttctcacgacctacaaatcctcttgcgttaccttcttcgaggccagacgattcgataaagtaaaaatagtgcgagagtcgatgaaccggatgattgaggcgtggaaggagatcccgggtgctgaagaggacgagtgctcctccgctccgccaccagcgtcccaatcacaacgaagatcttctcttacagggagtgcaagtgatgggcgatatccagctgcttcgctgggctcaaactctgttccatcatcaacaaggaggagcagattacctgtgagcagatcatctccgcctgatgtgtcacccagtgtcaccaaaacaaatagtccttcgtccatcaggaacaagaagctgtcaccaccttcatatcgcaaagtgcgccaagcaaataattgtgactacaaggttgagattgctgttgctccggatgctaccccaatcaaagtggtgactgaggagaagctactgaaaggaggcaatgtgagagacagactggaggctaggagaacactcttccaaggcagcgaggataggtcagccaagctggctggacacaaagcagggtcacgagttgttccgtacgagggcggtggtaatttggaagagatttcagaagttgaaggtggatcagaaaggtatacagttcataaggatgagagcttgtcagaaataaggacgcagctccttcagattgaaaatcagcaaagcagtttactggatcttctccagaaatttatgggtaagtccgagaatggtatgaattctttggagacaagggtgcatgggctggagatggctttggatgagatctctcgtgatttggccttctcttcaggaaggatgtcaaacagggagcctgatgtaaagacgtgctgcattctgagtccaaaattctggagaaggcacaatggtggtaggtcttcctcaaggttttctgcctcagacccagcaaacagctcagacgagagcagaacttcttacaaatgggagagacagaagtttgggcttcagggtggctttgtcacaaacccattagccgagccaaacatttcttcagtagggaaaacaatggttactcaagaaggcaggaagaaggatacaactttacaaaagtcaaggatgggt

SEQ ID NO: 793 - DNA, 1848 bp, Artificial sequence; identical to SEQ ID NO: 792
  miRNA-Resistant target example

SEQ ID NO: 794 - DNA, 1848 bp, Artificial sequence; identical to SEQ ID NO: 792
  miRNA-Resistant target example

SEQ ID NO: 795 - DNA, 1848 bp, Artificial sequence; identical to SEQ ID NO: 792
  miRNA-Resistant target example

SEQ ID NO: 796 - DNA, 2040 bp, Artificial sequence
  miRNA-Resistant target example
atggggattgatctcaacgccgtgggggaggacgacccggcgggcgcggtgtgcgcggagctgtggcacgcgtgcgcgggggctggagtggcgctgccgcggcggggcagcgccgtggtgtacctgcctcaggcgcacctcgcggcgggcggctgcgacggtggtggggtgtcggcgccggccccgccgcgcgtgccgccgcacgtggtgtgtcgcgtcgtcgacgtcgagctacgcgcggatgcggccacggacgaggtgtacgcgcggcttgcgctggtggcgatggatacgatgtttggccgaaacatcaatgatggtgaaactgaagagaagaatggcgaggaagaggatggcgacggagaaaagaagcacgcatcacacatgttctgcaagacactcacagcttctgataccagcacacatgggggattctctgttccacggcgagctgcagaggactgctttccaccattggactatgagcagcttaggccttcccaagagcttattgccaaggatttgcatggcatgaaatggaggttccgtcatatctatagaggtcaacctcgaaggcatcttctgacaactggatggagttcatttatcaataagaagaaactagtctcaggggatgcagtcttgtttcttagaggtaatgatggtgagctaagattgggtgtgaggagagcagttcaactgaaaaatgaagctctacttgaagctgtcaactgtactgattcgaagctacttatgctgtctgctgtggccaattctttggacaacagaagtatatttcacatctgtttcaacccaagggttggtgcatcagaatttattgtgccgtattgcaagttcttgaagagcttgaactatcacttttcagttggaaccagatttaaagttggctgcgagaatgaagatgctaacgagaggtcctttggattgatcataggtattagtgaagttgatcccatacactggcctggatcaaaatggaaatctctcctgataaagtgggatggtgctactaagtacagccaccagaatagagtatctccatgggacatcgagggagttggcagctcagtttcagttactcaccgactttcctcttctgtttcgaagcgaacaaaactgtgcttccctccaagcgatttggacacgccaattctagatggaaacggtcgtccagactcagtggaaactgaacgtttccacagggtcttgcaaggtcaagaattggtgcactctagtattcatggtactgcatgctctcattcatcagatagccccagatgtcaaggctcttatggcaggagattctctgctgatgcgtggaactgcaagatgaatgatgtaatgagtgggcctcgacacctaaatgccactgggtttgcttaccagcccctaggcttcagtgaatctgtcaaattctcagaagtactacagggacaggagatgtctcaggcggttccttccttcatgagatctgctttcaactctggcacgcagaatggcagggttcgaccatttgattatgtgcagagatcagatgcaactcaaggatacgctctccagcagtttaatctgccagcaacagaagtgcattcgccctcttctgttcttatgtttaaccaaaccatggtaccacatgctgagctagatggtgcgaccaaccgtgaagaagtacatggcagcaggtacttgtcatccaatgcaatagggagagaagctgaaccatggccatccatgcagcagcaaagagcgagtgtaaatggaagcgagcctctcgacacaactgaagcctcagctcctgcaaggaacgctgaatctggatcggtcggcaggggcgcggggcgaagcaactgtaagctttttggtttctccctgactgagaagatccttggaacggatggtggtggtgtgaaagaagggaactacgaagtggaccgtcaaactccccgggtgctagacttgtttgggcacggttctacgcctggagctctgcatgctctctgtgctgctcccttgggaata

SEQ ID NO: 797 - DNA, 2040 bp, Artificial sequence
  miRNA-Resistant target example
atggggattgatctcaacgccgtgggggaggacgacccggcgggcgcggtgtgcgcggagctgtggcacgcgtgcgcgggggctggagtggcgctgccgcggcggggcagcgccgtggtgtacctgcctcaggcgcacctcgcggcgggcggctgcgacggtggtggggtgtcggcgccggccccgccgcgcgtgccgccgcacgtggtgtgtcgcgtcgtcgacgtcgagctacgcgcggatgcggccacggacgaggtgtacgcgcggcttgcgctggtggcgatggatacgatgtttggccgaaacatcaatgatggtgaaactgaagagaagaatggcgaggaagaggatggcgacggagaaaagaagcacgcatcacacatgttctgcaagacactcacagcttctgataccagcacacatgggggattctctgttccacggcgagctgcagaggactgctttccaccattggactatgagcagcttaggccttcccaagagcttattgccaaggatttgcatggcatgaaatggaggttccgtcatatctatagaggtcaacctcgaaggcatcttctgacaactggatggagttcatttatcaataagaagaaactagtctcaggggatgcagtcttgtttcttagaggtaatgatggtgagctaagattgggtgtgaggagagcagttcaactgaaaaatgaagctctacttgaagctgtcaactgtactgattcgaagctacttatgctgtctgctgtggccaattctttggacaacagaagtatatttcacatctgtttcaacccaagggttggtgcatcagaatttattgtgccgtattgcaagttcttgaagagcttgaactatcacttttcagttggaaccagatttaaagttggctgcgagaatgaagatgctaacgagaggtcctttggattgatcataggtattagtgaagttgatcccatacactggcctggatcaaaatggaaatctctcctgataaagtgggatggtgctactaagtacagccaccagaatagagtatctccatgggacatcgagggagttggcagctcagtttcagttactcaccgactttcctcttctgtttcgaagcgaacaaaactgtgcttccctccaagcgatttggacacgccaattctagatggaaacggtcgtccagactcagtggaaactgaacgtttccacagggtcttgcaaggtcaagaattggtgcactctagtattcatggtactgcatgctctcattcatcagatagccccagatgtcaaggctcttatggcaggagattctctgctgatgcgtggaactgcaagatgaatgatgtaatgagtgggcctcgacacctaaatgccactgggtttgcttaccagcccctaggcttcagtgaatctgtcaaattctcagaggtactacagggacaggagatgtctcaggcggttccttccttcatgagatctgctttcaactctggcacgcagaatggcagggttcgaccatttgattatgtgcagagatcagatgcaactcaaggatacgctctccagcagtttaatctgccagcaacagaagtgcattcgccctcttctgttcttatgtttaaccaaaccatggtaccacatgctgagctagatggtgcgaccaaccgtgaagaagtacatggcagcaggtacttgtcatccaatgcaatagggagagaagctgaaccatggccatccatgcagcagcaaagagcgagtgtaaatggaagcgagcctctcgacacaactgaagcctcagctcctgcaaggaacgctgaatctggatcggtcggcaggggcgcggggcgaagcaactgtaagctttttggtttctccctgactgagaagatccttggaacggatggtggtggtgtgaaagaagggaactacgaagtggaccgtcaaactccccgggtgctagacttgtttgggcacggttctacgcctggagctctgcatgctctctgtgctgctcccttgggaata

SEQ ID NO: 798 - DNA, 2040 bp, Artificial sequence
  miRNA-Resistant target example
atggggattgatctcaacgccgtgggggaggacgacccggcgggcgcggtgtgcgcggagctgtggcacgcgtgcgcgggggctggagtggcgctgccgcggcggggcagcgccgtggtgtacctgcctcaggcgcacctcgcggcgggcggctgcgacggtggtggggtgtcggcgccggccccgccgcgcgtgccgccgcacgtggtgtgtcgcgtcgtcgacgtcgagctacgcgcggatgcggccacggacgaggtgtacgcgcggcttgcgctggtggcgatggatacgatgtttggccgaaacatcaatgatggtgaaactgaagagaagaatggcgaggaagaggatggcgacggagaaaagaagcacgcatcacacatgttctgcaagacactcacagcttctgataccagcacacatgggggattctctgttccacggcgagctgcagaggactgctttccaccattggactatgagcagcttaggccttcccaagagcttattgccaaggatttgcatggcatgaaatggaggttccgtcatatctatagaggtcaacctcgaaggcatcttctgacaactggatggagttcatttatcaataagaagaaactagtctcaggggatgcagtcttgtttcttagaggtaatgatggtgagctaagattgggtgtgaggagagcagttcaactgaaaaatgaagctctacttgaagctgtcaactgtactgattcgaagctacttatgctgtctgctgtggccaattctttggacaacagaagtatatttcacatctgtttcaacccaagggttggtgcatcagaatttattgtgccgtattgcaagttcttgaagagcttgaactatcacttttcagttggaaccagatttaaagttggctgcgagaatgaagatgctaacgagaggtcctttggattgatcataggtattagtgaagttgatcccatacactggcctggatcaaaatggaaatctctcctgataaagtgggatggtgctactaagtacagccaccagaatagagtatctccatgggacatcgagggagttggcagctcagtttcagttactcaccgactttcctcttctgtttcgaagcgaacaaaactgtgcttccctccaagcgatttggacacgccaattctagatggaaacggtcgtccagactcagtggaaactgaacgtttccacagggtcttgcaaggtcaagaattggtgcactctagtattcatggtactgcatgctctcattcatcagatagccccagatgtcaaggctcttatggcaggagattctctgctgatgcgtggaactgcaagatgaatgatgtaatgagtgggcctcgacacctaaatgccactgggtttgcttaccagcccctaggcttcagtgaatctgtcaaattctcagaagtcctacagggacaggagatgtctcaggcggttccttccttcatgagatctgctttcaactctggcacgcagaatggcagggttcgaccatttgattatgtgcagagatcagatgcaactcaaggatacgctctccagcagtttaatctgccagcaacagaagtgcattcgccctcttctgttcttatgtttaaccaaaccatggtaccacatgctgagctagatggtgcgaccaaccgtgaagaagtacatggcagcaggtacttgtcatccaatgcaatagggagagaagctgaaccatggccatccatgcagcagcaaagagcgagtgtaaatggaagcgagcctctcgacacaactgaagcctcagctcctgcaaggaacgctgaatctggatcggtcggcaggggcgcggggcgaagcaactgtaagctttttggtttctccctgactgagaagatccttggaacggatggtggtggtgtgaaagaagggaactacgaagtggaccgtcaaactccccgggtgctagacttgtttgggcacggttctacgcctggagctctgcatgctctctgtgctgctcccttgggaata

SEQ ID NO: 799 - DNA, 2040 bp, Artificial sequence
  miRNA-Resistant target example
atggggattgatctcaacgccgtgggggaggacgacccggcgggcgcggtgtgcgcggagctgtggcacgcgtgcgcgggggctggagtggcgctgccgcggcggggcagcgccgtggtgtacctgcctcaggcgcacctcgcggcgggcggctgcgacggtggtggggtgtcggcgccggccccgccgcgcgtgccgccgcacgtggtgtgtcgcgtcgtcgacgtcgagctacgcgcggatgcggccacggacgaggtgtacgcgcggcttgcgctggtggcgatggatacgatgtttggccgaaacatcaatgatggtgaaactgaagagaagaatggcgaggaagaggatggcgacggagaaaagaagcacgcatcacacatgttctgcaagacactcacagcttctgataccagcacacatgggggattctctgttccacggcgagctgcagaggactgctttccaccattggactatgagcagcttaggccttcccaagagcttattgccaaggatttgcatggcatgaaatggaggttccgtcatatctatagaggtcaacctcgaaggcatcttctgacaactggatggagttcatttatcaataagaagaaactagtctcaggggatgcagtcttgtttcttagaggtaatgatggtgagctaagattgggtgtgaggagagcagttcaactgaaaaatgaagctctacttgaagctgtcaactgtactgattcgaagctacttatgctgtctgctgtggccaattctttggacaacagaagtatatttcacatctgtttcaacccaagggttggtgcatcagaatttattgtgccgtattgcaagttcttgaagagcttgaactatcacttttcagttggaaccagatttaaagttggctgcgagaatgaagatgctaacgagaggtcctttggattgatcataggtattagtgaagttgatcccatacactggcctggatcaaaatggaaatctctcctgataaagtgggatggtgctactaagtacagccaccagaatagagtatctccatgggacatcgagggagttggcagctcagtttcagttactcaccgactttcctcttctgtttcgaagcgaacaaaactgtgcttccctccaagcgatttggacacgccaattctagatggaaacggtcgtccagactcagtggaaactgaacgtttccacagggtcttgcaaggtcaagaattggtgcactctagtattcatggtactgcatgctctcattcatcagatagccccagatgtcaaggctcttatggcaggagattctctgctgatgcgtggaactgcaagatgaatgatgtaatgagtgggcctcgacacctaaatgccactgggtttgcttaccagcccctaggcttcagtgaatctgtcaaattctcagaagtattgcagggacaggagatgtctcaggcggttccttccttcatgagatctgctttcaactctggcacgcagaatggcagggttcgaccatttgattatgtgcagagatcagatgcaactcaaggatacgctctccagcagtttaatctgccagcaacagaagtgcattcgccctcttctgttcttatgtttaaccaaaccatggtaccacatgctgagctagatggtgcgaccaaccgtgaagaagtacatggcagcaggtacttgtcatccaatgcaatagggagagaagctgaaccatggccatccatgcagcagcaaagagcgagtgtaaatggaagcgagcctctcgacacaactgaagcctcagctcctgcaaggaacgctgaatctggatcggtcggcaggggcgcggggcgaagcaactgtaagctttttggtttctccctgactgagaagatccttggaacggatggtggtggtgtgaaagaagggaactacgaagtggaccgtcaaactccccgggtgctagacttgtttgggcacggttctacgcctggagctctgcatgctctctgtgctgctcccttgggaata

SEQ ID NO: 800 - DNA, 2040 bp, Artificial sequence
  miRNA-Resistant target example
atggggattgatctcaacgccgtgggggaggacgacccggcgggcgcggtgtgcgcggagctgtggcacgcgtgcgcgggggctggagtggcgctgccgcggcggggcagcgccgtggtgtacctgcctcaggcgcacctcgcggcgggcggctgcgacggtggtggggtgtcggcgccggccccgccgcgcgtgccgccgcacgtggtgtgtcgcgtcgtcgacgtcgagctacgcgcggatgcggccacggacgaggtgtacgcgcggcttgcgctggtggcgatggatacgatgtttggccgaaacatcaatgatggtgaaactgaagagaagaatggcgaggaagaggatggcgacggagaaaagaagcacgcatcacacatgttctgcaagacactcacagcttctgataccagcacacatgggggattctctgttccacggcgagctgcagaggactgctttccaccattggactatgagcagcttaggccttcccaagagcttattgccaaggatttgcatggcatgaaatggaggttccgtcatatctatagaggtcaacctcgaaggcatcttctgacaactggatggagttcatttatcaataagaagaaactagtctcaggggatgcagtcttgtttcttagaggtaatgatggtgagctaagattgggtgtgaggagagcagttcaactgaaaaatgaagctctacttgaagctgtcaactgtactgattcgaagctacttatgctgtctgctgtggccaattctttggacaacagaagtatatttcacatctgtttcaacccaagggttggtgcatcagaatttattgtgccgtattgcaagttcttgaagagcttgaactatcacttttcagttggaaccagatttaaagttggctgcgagaatgaagatgctaacgagaggtcctttggattgatcataggtattagtgaagttgatcccatacactggcctggatcaaaatggaaatctctcctgataaagtgggatggtgctactaagtacagccaccagaatagagtatctccatgggacatcgagggagttggcagctcagtttcagttactcaccgactttcctcttctgtttcgaagcgaacaaaactgtgcttccctccaagcgatttggacacgccaattctagatggaaacggtcgtccagactcagtggaaactgaacgtttccacagggtcttgcaaggtcaagaattggtgcactctagtattcatggtactgcatgctctcattcatcagatagccccagatgtcaaggctcttatggcaggagattctctgctgatgcgtggaactgcaagatgaatgatgtaatgagtgggcctcgacacctaaatgccactgggtttgcttaccagcccctaggcttcagtgaatctgtcaaattctcagaagtactacaaggacaagagatgtctcaggcggttccttccttcatgagatctgctttcaactctggcacgcagaatggcagggttcgaccatttgattatgtgcagagatcagatgcaactcaaggatacgctctccagcagtttaatctgccagcaacagaagtgcattcgccctcttctgttcttatgtttaaccaaaccatggtaccacatgctgagctagatggtgcgaccaaccgtgaagaagtacatggcagcaggtacttgtcatccaatgcaatagggagagaagctgaaccatggccatccatgcagcagcaaagagcgagtgtaaatggaagcgagcctctcgacacaactgaagcctcagctcctgcaaggaacgctgaatctggatcggtcggcaggggcgcggggcgaagcaactgtaagctttttggtttctccctgactgagaagatccttggaacggatggtggtggtgtgaaagaagggaactacgaagtggaccgtcaaactccccgggtgctagacttgtttgggcacggttctacgcctggagctctgcatgctctctgtgctgctcccttgggaata

SEQ ID NO: 801 - DNA, 1518 bp, Artificial sequence
  miRNA-Resistant target example
atggtggcgtcggccaagggacggctcgtgtccgtgctcgcggtggcggcggcgctcgcggccgtgctcctctaccgcgcccccttctccaagagcttgggcggcgaagggtgcagcctcttaccacatgatcatttttgggtcgccagcgaccgcgtcgtcacgctcggccgcgtcggccccgccgcagtggaggtcaaaggagggctcatcaacgccatcgcggtcggggactaccggagcttcgtgctccgccgtcctctcctggactacggggacgccgtcatcatgcccggcctcatcgacgtgcatgcccatctcgacgagcctggacgtgccgagtgggagggcttctctactggtacaagagcagctgcggcaggcgggataacgacgttggtggatatgccactcaacagcttcccgtcgacagtctctgaagaaactctcaaactgaagctggaagcagctcaagataagctatatgttgatgttgggttctggggaggacttgtgccagagaacgccttcaacccaagtgctttggagggcctcctaaatgcaggcgttttaggactcaagtcttttatgtgcccctcaggcatcaacgacttccccatgacaaattcaactcatattgaggaaggattggttacactggcaaaatacaagagacctttacttatccatgcagaacgtatacctgaggctgaggatgatgatatgcgagaggatgaactagatcctcgatcctatatgacgtatctaaagtctagaccaccatcatgggaggaatcagctatcagagatctacaccgtgcaatgaaggatacggagtcggggggtcggtccgaaggagctcatattcacattgttcatctatcagatgcaaaaacttccttggaacttatgaaggatgctaaacgcagtggtgcaagtttatcaatagaaacatgccctcattacctggcattttcatctgaagaagttccagatggcgatactcgctttaaatgttctcctcccatacgtgatgacacaaacagagaaaatctttggaaagctctacttgatggacacatagacatgctaagttcagaccactcaccatcaactcctgatctcaaactaatggaggaaggcaactttttaagggcatggggaggcatatcatcattgcagtttgtcctcccggtaacatggtcatatgggcgaaagtacggcattactctgaatcagctatcctcatggtggagcgaaaatccagccaagcttgcaggccaaaagaacaagggagctattctaccaggataccatgctgacatagtagtatggaaacccgaaactgagttccaactcgatgacagccatgttatatatcataaacatcagaatatttcggcgtatctaggaaagcaactttctggtaaggtcctgtcaacttttgtgagaggaaaccttgtgtttgctgaagacaagcatgcaaatgttgcttgtggtgttcctatcctcgctaag

SEQ ID NO: 802 - DNA, 1518 bp, Artificial sequence
  miRNA-Resistant target example
atggtggcgtcggccaagggacggctcgtgtccgtgctcgcggtggcggcggcgctcgcggccgtgctcctctaccgcgcccccttctccaagagcttgggcggcgaagggtgcagcctcctcccacatgatcatttttgggtcgccagcgaccgcgtcgtcacgctcggccgcgtcggccccgccgcagtggaggtcaaaggagggctcatcaacgccatcgcggtcggggactaccggagcttcgtgctccgccgtcctctcctggactacggggacgccgtcatcatgcccggcctcatcgacgtgcatgcccatctcgacgagcctggacgtgccgagtgggagggcttctctactggtacaagagcagctgcggcaggcgggataacgacgttggtggatatgccactcaacagcttcccgtcgacagtctctgaagaaactctcaaactgaagctggaagcagctcaagataagctatatgttgatgttgggttctggggaggacttgtgccagagaacgccttcaacccaagtgctttggagggcctcctaaatgcaggcgttttaggactcaagtcttttatgtgcccctcaggcatcaacgacttccccatgacaaattcaactcatattgaggaaggattggttacactggcaaaatacaagagacctttacttatccatgcagaacgtatacctgaggctgaggatgatgatatgcgagaggatgaactagatcctcgatcctatatgacgtatctaaagtctagaccaccatcatgggaggaatcagctatcagagatctacaccgtgcaatgaaggatacggagtcggggggtcggtccgaaggagctcatattcacattgttcatctatcagatgcaaaaacttccttggaacttatgaaggatgctaaacgcagtggtgcaagtttatcaatagaaacatgccctcattacctggcattttcatctgaagaagttccagatggcgatactcgctttaaatgttctcctcccatacgtgatgacacaaacagagaaaatctttggaaagctctacttgatggacacatagacatgctaagttcagaccactcaccatcaactcctgatctcaaactaatggaggaaggcaactttttaagggcatggggaggcatatcatcattgcagtttgtcctcccggtaacatggtcatatgggcgaaagtacggcattactctgaatcagctatcctcatggtggagcgaaaatccagccaagcttgcaggccaaaagaacaagggagctattctaccaggataccatgctgacatagtagtatggaaacccgaaactgagttccaactcgatgacagccatgttatatatcataaacatcagaatatttcggcgtatctaggaaagcaactttctggtaaggtcctgtcaacttttgtgagaggaaaccttgtgtttgctgaagacaagcatgcaaatgttgcttgtggtgttcctatcctcgctaag

SEQ ID NO: 803 - DNA, 1518 bp, Artificial sequence; identical to SEQ ID NO: 802
  miRNA-Resistant target example

SEQ ID NO: 804 - DNA, 1518 bp, Artificial sequence; identical to SEQ ID NO: 802
  miRNA-Resistant target example

SEQ ID NO: 805 - DNA, 1518 bp, Artificial sequence; identical to SEQ ID NO: 802
  miRNA-Resistant target example

SEQ ID NO: 806 - DNA, 1638 bp, Artificial sequence
  miRNA-Resistant target example
atgttcgccacctttctcctgctgctgtggtcccatgccccggcgccggcgctctcgctgccgccgcgccctccggtacgctgcagcgatggcgggaccacgggctgcgtgctctccaacgcctacggcgcgtggtcgagcgaccgcgccgactgccccgtctcctccgtcgcgtacccggcgtccgagcaggaggtggtcgcggccgtggcgcgcgccagcgccagcggcgcccgcgtcaaggtcgtgagcggcttcgcgcacaccattccgaagctcgcctgccccggcggcggcaacggcactaccaccaccctgctcatcagcctcacggcggcgccgtactgggagggcgtcagcgtcgcggggctcgtgagcacagggtcccacggcagctcgtggtggggccgcggcggtgcagtacatgatcatgtagtagggctcaggctcgtcgttaccgccggggaggctgacggctgggccagggtcctgacgctgcgcagaggcgacgagctcttcccggctgcgcttgtctcgctcgggctgcttggggtcgtctccaagatcacgctgtcactggaaccgaggttcaagcgcagcatcaccttcgactacaggaacgattccaccttccaggacgacttcgccgctcacgcggcgagccacgagttcgccgacatcacctggtacccgtcccagcacacggccgtgtaccgcatcgacgaccgcgcgccggccaacgcgcctggggacggcgtcaacgacttcatcggcttccaggcgacgcccatcgctgtcaccgccgggctcagagtggtagaaacttcactggagcggtccaagaacatgaagggcaagtgtgcgatggcggcggcggagggcgtggcgaagcggctggtcggcaacgggctgaagaacaacggcctgctgttcacggggtaccccgtggtggggtaccaggggaagatgcagacgtcgggctcctgcgcgcgctcctcggcggcggacctgctcagcgcgtgcgggtgggatcccaggttccacggcctcttcttctacgagagcacggcgatcttctcgccggcccggttccgggacttcatcctcgacgtgaagcgcctgcgggacctcgccggctcggacagcctctgcggcgtcgacgtgtacaacggcctcctggtccggttcgtgaaggcgtccgcggcgcacctcggccagccggaggactccgtcgtggtggacttcaactattaccgcgcgtcggactcggcggcgccgcggctgagccaggacgtgtgggaggaggtggagcagctggcgttcgtcaagcacggcgccaggccacactgggccaagaaccgtttggtggcgttcgccggcgtgcggggcaagtacccgcggtggggccagtttgcggcggctaagcggcagctggacccccggggcttgttcgacagcccgtggtcggacgaggtcgtcggcggggtggagctggccaagggcgacgggtgcgcgctggacggccggtgcgtgtgctccgaggacaggcactgcagccccgagcaggggtactactgcaggccggggctcgtgtttacggacgccagggtctgcaggtactcggggtcgcagaaccag

SEQ ID NO: 807 - DNA, 1638 bp, Artificial sequence
  miRNA-Resistant target example
atgttcgccacctttctcctgctgctgtggtcccatgccccggcgccggcgctctcgctgccgccgcgccctccggtacgctgcagcgatggcgggaccacgggctgcgtgctctccaacgcctacggcgcgtggtcgagcgaccgcgccgactgccccgtctcctccgtcgcgtacccggcgtccgagcaggaggtggtcgcggccgtggcgcgcgccagcgccagcggcgcccgcgtcaaggtcgtgagcggcttcgcgcacaccattccgaagctcgcctgccccggcggcggcaacggcactaccaccaccctgctcatcagcctcacggcggcgccgtactgggagggcgtcagcgtcgcggggctcgtgagcacagggtcccacggcagctcgtggtggggccgcggcggtgccgtacatgatcatgtagtagggctcaggctcgtcgttaccgccggggaggctgacggctgggccagggtcctgacgctgcgcagaggcgacgagctcttcccggctgcgcttgtctcgctcgggctgcttggggtcgtctccaagatcacgctgtcactggaaccgaggttcaagcgcagcatcaccttcgactacaggaacgattccaccttccaggacgacttcgccgctcacgcggcgagccacgagttcgccgacatcacctggtacccgtcccagcacacggccgtgtaccgcatcgacgaccgcgcgccggccaacgcgcctggggacggcgtcaacgacttcatcggcttccaggcgacgcccatcgctgtcaccgccgggctcagagtggtagaaacttcactggagcggtccaagaacatgaagggcaagtgtgcgatggcggcggcggagggcgtggcgaagcggctggtcggcaacgggctgaagaacaacggcctgctgttcacggggtaccccgtggtggggtaccaggggaagatgcagacgtcgggctcctgcgcgcgctcctcggcggcggacctgctcagcgcgtgcgggtgggatcccaggttccacggcctcttcttctacgagagcacggcgatcttctcgccggcccggttccgggacttcatcctcgacgtgaagcgcctgcgggacctcgccggctcggacagcctctgcggcgtcgacgtgtacaacggcctcctggtccggttcgtgaaggcgtccgcggcgcacctcggccagccggaggactccgtcgtggtggacttcaactattaccgcgcgtcggactcggcggcgccgcggctgagccaggacgtgtgggaggaggtggagcagctggcgttcgtcaagcacggcgccaggccacactgggccaagaaccgtttggtggcgttcgccggcgtgcggggcaagtacccgcggtggggccagtttgcggcggctaagcggcagctggacccccggggcttgttcgacagcccgtggtcggacgaggtcgtcggcggggtggagctggccaagggcgacgggtgcgcgctggacggccggtgcgtgtgctccgaggacaggcactgcagccccgagcaggggtactactgcaggccggggctcgtgtttacggacgccagggtctgcaggtactcggggtcgcagaaccag

SEQ ID NO: 808 - DNA, 1638 bp, Artificial sequence; identical to SEQ ID NO: 807
  miRNA-Resistant target example

SEQ ID NO: 809 - DNA, 1638 bp, Artificial sequence; identical to SEQ ID NO: 807
  miRNA-Resistant target example

SEQ ID NO: 810 - DNA, 1638 bp, Artificial sequence
  miRNA-Resistant target example
atgttcgccacctttctcctgctgctgtggtcccatgccccggcgccggcgctctcgctgccgccgcgccctccggtacgctgcagcgatggcgggaccacgggctgcgtgctctccaacgcctacggcgcgtggtcgagcgaccgcgccgactgccccgtctcctccgtcgcgtacccggcgtccgagcaggaggtggtcgcggccgtggcgcgcgccagcgccagcggcgcccgcgtcaaggtcgtgagcggcttcgcgcacaccattccgaagctcgcctgccccggcggcggcaacggcactaccaccaccctgctcatcagcctcacggcggcgccgtactgggagggcgtcagcgtcgcggggctcgtgagcacagggtcccacggcagctcgtggtggggccgcggcggtgcagtgcatgatcatgtggtggggctcaggctcgtcgttaccgccggggaggctgacggctgggccagggtcctgacgctgcgcagaggcgacgagctcttcccggctgcgcttgtctcgctcgggctgcttggggtcgtctccaagatcacgctgtcactggaaccgaggttcaagcgcagcatcaccttcgactacaggaacgattccaccttccaggacgacttcgccgctcacgcggcgagccacgagttcgccgacatcacctggtacccgtcccagcacacggccgtgtaccgcatcgacgaccgcgcgccggccaacgcgcctggggacggcgtcaacgacttcatcggcttccaggcgacgcccatcgctgtcaccgccgggctcagagtggtagaaacttcactggagcggtccaagaacatgaagggcaagtgtgcgatggcggcggcggagggcgtggcgaagcggctggtcggcaacgggctgaagaacaacggcctgctgttcacggggtaccccgtggtggggtaccaggggaagatgcagacgtcgggctcctgcgcgcgctcctcggcggcggacctgctcagcgcgtgcgggtgggatcccaggttccacggcctcttcttctacgagagcacggcgatcttctcgccggcccggttccgggacttcatcctcgacgtgaagcgcctgcgggacctcgccggctcggacagcctctgcggcgtcgacgtgtacaacggcctcctggtccggttcgtgaaggcgtccgcggcgcacctcggccagccggaggactccgtcgtggtggacttcaactattaccgcgcgtcggactcggcggcgccgcggctgagccaggacgtgtgggaggaggtggagcagctggcgttcgtcaagcacggcgccaggccacactgggccaagaaccgtttggtggcgttcgccggcgtgcggggcaagtacccgcggtggggccagtttgcggcggctaagcggcagctggacccccggggcttgttcgacagcccgtggtcggacgaggtcgtcggcggggtggagctggccaagggcgacgggtgcgcgctggacggccggtgcgtgtgctccgaggacaggcactgcagccccgagcaggggtactactgcaggccggggctcgtgtttacggacgccagggtctgcaggtactcggggtcgcagaaccag

SEQ ID NO: 811 - DNA, 1104 bp, Artificial sequence
  miRNA-Resistant target example
atggtcatgggagccagcggctccaagcttgagaaggccctcggtgaccagttcccggaaggcgagcgctacttcggcctcgagaacttcggcaacacatgttattgtaattcagtattacaggcactctatttttgcattccatttagggagcagttactggaatattatgcaaataacaaaactccaggtgacgctgaagaaaatcttttgacctgtttggccgacctttttatgcagataagccaagcaaagaaaaagactggcgttattgctccaaaacgttttgttcagagagtgaagaaacagaatgagttgtttcgcagctacatgcaccaggatgcacacgagttcttaaatttccttttgaatgaacttgttgatattctggaaaaagagtcaagtgctgccaaggattcaccccaattgtcatctcctgaaaaagctccaaatggcccagttcaacctttagccaatggagttaaaaaagaacctccagttactctggtccataaaaatttccagggcatattgaccaacgaaacaagatgcttaagatgtgaaacagtaactgcaagggatgaaacatttcttgatcttagtgttgacattgaacaaaatagttctatcacaagctgcctgaaaaatttctgttctactgagactttaaatgcagaggataaattcttctgcgacaaatgctgcagtttgcaagaagcacagaagagaatgaagatcaagaaggctccccacatattggtgatccatctaaagcgtttcaagtacattgagcagcttggccggtataagaagctttcataccgggttgtattccccatggaactgaagctcagtaatacatccgacgatgtagacactgagtactccctctttgctgtcgtggtccatgtcggaagtggccccaaccatgggcattatgtaagccttgtcaaaagccacaaccactggttgttcttcgacgacgaaaacgtcgagatggttgaagagcagaccctacaaacattcttcggttcctcacatgaatactcaggaaacacagaccatgggtatatcttattttacgaggggcttggcgggaagagt

SEQ ID NO: 812 - DNA, 1104 bp, Artificial sequence
  miRNA-Resistant target example
atggtcatgggagccagcggctccaagcttgagaaggccctcggtgaccagttcccggaaggcgagcgctacttcggcctcgagaacttcggcaacacctgttattgtaattcagtattacaggcactctatttttgcattccatttagggagcagttactggaatattatgcaaataacaaaactccaggtgacgctgaagaaaatcttttgacctgtttggccgacctttttatgcagataagccaagcaaagaaaaagactggcgttattgctccaaaacgttttgttcagagagtgaagaaacagaatgagttgtttcgcagctacatgcaccaggatgcacacgagttcttaaatttccttttgaatgaacttgttgatattctggaaaaagagtcaagtgctgccaaggattcaccccaattgtcatctcctgaaaaagctccaaatggcccagttcaacctttagccaatggagttaaaaaagaacctccagttactctggtccataaaaatttccagggcatattgaccaacgaaacaagatgcttaagatgtgaaacagtaactgcaagggatgaaacatttcttgatcttagtgttgacattgaacaaaatagttctatcacaagctgcctgaaaaatttctgttctactgagactttaaatgcagaggataaattcttctgcgacaaatgctgcagtttgcaagaagcacagaagagaatgaagatcaagaaggctccccacatattggtgatccatctaaagcgtttcaagtacattgagcagcttggccggtataagaagctttcataccgggttgtattccccatggaactgaagctcagtaatacatccgacgatgtagacactgagtactccctctttgctgtcgtggtccatgtcggaagtggccccaaccatgggcattatgtaagccttgtcaaaagccacaaccactggttgttcttcgacgacgaaaacgtcgagatggttgaagagcagaccctacaaacattcttcggttcctcacatgaatactcaggaaacacagaccatgggtatatcttattttacgaggggcttggcgggaagagt

SEQ ID NO: 813 - DNA, 1104 bp, Artificial sequence; identical to SEQ ID NO: 812
  miRNA-Resistant target example

SEQ ID NO: 814 - DNA, 1104 bp, Artificial sequence; identical to SEQ ID NO: 812
  miRNA-Resistant target example

SEQ ID NO: 815 - DNA, 1104 bp, Artificial sequence
  miRNA-Resistant target example
atggtcatgggagccagcggctccaagcttgagaaggccctcggtgaccagttcccggaaggcgagcgctacttcggcctcgagaacttcggcaacacatgctattgcaattcagtattacaggcactctatttttgcattccatttagggagcagttactggaatattatgcaaataacaaaactccaggtgacgctgaagaaaatcttttgacctgtttggccgacctttttatgcagataagccaagcaaagaaaaagactggcgttattgctccaaaacgttttgttcagagagtgaagaaacagaatgagttgtttcgcagctacatgcaccaggatgcacacgagttcttaaatttccttttgaatgaacttgttgatattctggaaaaagagtcaagtgctgccaaggattcaccccaattgtcatctcctgaaaaagctccaaatggcccagttcaacctttagccaatggagttaaaaaagaacctccagttactctggtccataaaaatttccagggcatattgaccaacgaaacaagatgcttaagatgtgaaacagtaactgcaagggatgaaacatttcttgatcttagtgttgacattgaacaaaatagttctatcacaagctgcctgaaaaatttctgttctactgagactttaaatgcagaggataaattcttctgcgacaaatgctgcagtttgcaagaagcacagaagagaatgaagatcaagaaggctccccacatattggtgatccatctaaagcgtttcaagtacattgagcagcttggccggtataagaagctttcataccgggttgtattccccatggaactgaagctcagtaatacatccgacgatgtagacactgagtactccctctttgctgtcgtggtccatgtcggaagtggccccaaccatgggcattatgtaagccttgtcaaaagccacaaccactggttgttcttcgacgacgaaaacgtcgagatggttgaagagcagaccctacaaacattcttcggttcctcacatgaatactcaggaaacacagaccatgggtatatcttattttacgaggggcttggcgggaagagt

SEQ ID NO: 816 - DNA, 21 bp, Medicago truncatula
attcacggggacgaacctcct

SEQ ID NO: 817 - DNA, 21 bp, Zea Mays
tagccagggatgatttgcctg

SEQ ID NO: 818 - DNA, 21 bp, Zea Mays
tagccagggatgatttgcctg

SEQ ID NO: 819 - DNA, 21 bp, Zea Mays
ggaatcttgatgatgctgcat

SEQ ID NO: 820 - DNA, 21 bp, Zea Mays
ttagatgaccatcagcaaaca

SEQ ID NO: 821 - DNA, 21 bp, Zea mays
agaagagagagagtacagcct

SEQ ID NO: 822 - DNA, 24 bp, Artificial sequence
  Bulge Reverse Complement miR
gggttgtgctcctatctctcttct

SEQ ID NO: 823 - DNA, 25 bp, Artificial sequence
  Bulge Reverse Complement miR
cgtctgtgttctctactctctcaag

SEQ ID NO: 824 - DNA, 24 bp, Artificial sequence
  Bulge Reverse Complement miR
ccggcaagtcactatcctggctca

SEQ ID NO: 825 - DNA, 24 bp, Artificial sequence
  Bulge Reverse Complement miR
aggaggttcgtctaccccgtgaat

SEQ ID NO: 826 - DNA, 24 bp, Artificial sequence
  Bulge Reverse Complement miR
gagttcccccactaaacacttcat

SEQ ID NO: 827 - DNA, 24 bp, Artificial sequence
  Bulge Reverse Complement miR
cttagccaggactaaggctcacca

SEQ ID NO: 828 - DNA, 27 bp, Artificial sequence
  Bulge Reverse Complement miR
tggctgctccctcgctattttccgtga

SEQ ID NO: 829 - DNA, 24 bp, Artificial sequence
  Bulge Reverse Complement miR
tcccgccgattctatcccctcagg

SEQ ID NO: 830 - DNA, 24 bp, Artificial sequence
  Bulge Reverse Complement miR
gagttcccccactaaacacttcac

SEQ ID NO: 831 - DNA, 23 bp, Artificial sequence
  Bulge Reverse Complement miR
tcccagcccgctatcccccggcc

SEQ ID NO: 832 - DNA, 27 bp, Artificial sequence
  Bulge Reverse Complement miR
tttcaattcggctcctaagtctttttt

SEQ ID NO: 833 - DNA, 27 bp, Artificial sequence
  Bulge Reverse Complement miR
tactccttccgtttctacgttttagtt

SEQ ID NO: 834 - DNA, 27 bp, Artificial sequence
  Bulge Reverse Complement miR
ctctctttcttcatctataaactcctt

SEQ ID NO: 835 - DNA, 27 bp, Artificial sequence
  Bulge Reverse Complement miR
ccgtcctactcctactaaaagcacctt

SEQ ID NO: 836 - DNA, 27 bp, Artificial sequence
  Bulge Reverse Complement miR
gccattccgttctactaattcctttgt

SEQ ID NO: 837 - DNA, 27 bp, Artificial sequence
  Bulge Reverse Complement miR
agcctcctcagtgtctacgtcatcagt

SEQ ID NO: 838 - DNA, 27 bp, Artificial sequence
  Bulge Reverse Complement miR
cggagccgttccatctatcctgattct

SEQ ID NO: 839 - DNA, 27 bp, Artificial sequence
  Bulge Reverse Complement miR
tagagccgttccatctaccctgattct

SEQ ID NO: 840 - DNA, 27 bp, Artificial sequence
  Bulge Reverse Complement miR
aacggcttcggctcctatggttcctct

SEQ ID NO: 841 - DNA, 27 bp, Artificial sequence
  Bulge Reverse Complement miR
cgtcctcttctcgcctaccgtgactct

SEQ ID NO: 842 - DNA, 27 bp, Artificial sequence
  Bulge Reverse Complement miR
aaaccgcccgctcactatctaggtcct

SEQ ID NO: 843 - DNA, 27 bp, Artificial sequence
  Bulge Reverse Complement miR
attctccgtctccactagcagcgtcct

SEQ ID NO: 844 - DNA, 27 bp, Artificial sequence
  Bulge Reverse Complement miR
tcatcaacgtcctcctacaccttgcct

SEQ ID NO: 845 - DNA, 27 bp, Artificial sequence
  Bulge Reverse Complement miR
tccccttgtcaccactaaatcagccct

SEQ ID NO: 846 - DNA, 27 bp, Artificial sequence
  Bulge Reverse Complement miR
accccttcaaaccgctaaacaagccct

SEQ ID NO: 847 - DNA, 27 bp, Artificial sequence
  Bulge Reverse Complement miR
ggtccatacctcctctaccctttatat

SEQ ID NO: 848 - DNA, 27 bp, Artificial sequence
  Bulge Reverse Complement miR
acctgtctcctccactagctgaccgat

SEQ ID NO: 849 - DNA, 27 bp, Artificial sequence
  Bulge Reverse Complement miR
ccttcttcgcagccctagttgaaagat

SEQ ID NO: 850 - DNA, 27 bp, Artificial sequence
  Bulge Reverse Complement miR
agttggatcatagtctactcttaccat

SEQ ID NO: 851 - DNA, 27 bp, Artificial sequence
  Bulge Reverse Complement miR
atgccccgatccagctatacaaaattg

SEQ ID NO: 852 - DNA, 27 bp, Artificial sequence
  Bulge Reverse Complement miR
acggcttcggctctctaggttcctctg

SEQ ID NO: 853 - DNA, 27 bp, Artificial sequence
  Bulge Reverse Complement miR
gtgctcttcttcccctatgtccagccg

SEQ ID NO: 854 - DNA, 27 bp, Artificial sequence
  Bulge Reverse Complement miR
gagccgttccatccctactaattctag

SEQ ID NO: 855 - DNA, 27 bp, Artificial sequence
  Bulge Reverse Complement miR
aaagcctccatctcctatccaagtttc

SEQ ID NO: 856 - DNA, 27 bp, Artificial sequence
  Bulge Reverse Complement miR
accagatccgctccctacttctctctc

SEQ ID NO: 857 - DNA, 27 bp, Artificial sequence
  Bulge Reverse Complement miR
ccgtgttgtccccactagttatccctc

SEQ ID NO: 858 - DNA, 27 bp, Artificial sequence
  Bulge Reverse Complement miR
gcaacactccccatctacccactccgc

SEQ ID NO: 859 - DNA, 27 bp, Artificial sequence
  Bulge Reverse Complement miR
acctctccaccaatctacccgtgcagc

SEQ ID NO: 860 - DNA, 27 bp, Artificial sequence
  Bulge Reverse Complement miR
ccagcagtctccgcctaatccgtctcc

SEQ ID NO: 861 - DNA, 27 bp, Artificial sequence
  Bulge Reverse Complement miR
ggtcctctacgctcctatccagcagcc

SEQ ID NO: 862 - DNA, 27 bp, Artificial sequence
  Bulge Reverse Complement miR
ccccttcactcgctctactcaaaaccc

SEQ ID NO: 863 - DNA, 27 bp, Artificial sequence
  Bulge Reverse Complement miR
tccacctcaatccactaccccaatacc

SEQ ID NO: 864 - DNA, 27 bp, Artificial sequence
  Bulge Reverse Complement miR
ttgagctcctcttgctacatcgccacc

SEQ ID NO: 865 - DNA, 27 bp, Artificial sequence
  Bulge Reverse Complement miR
atccccctcaatccctaactcctaacc

SEQ ID NO: 866 - DNA, 27 bp, Artificial sequence
  Bulge Reverse Complement miR
accacatgctcttactagtcacttgac

SEQ ID NO: 867 - DNA, 27 bp, Artificial sequence
  Bulge Reverse Complement miR
tcccctcaatctccctatccattccac

SEQ ID NO: 868 - DNA, 27 bp, Artificial sequence
  Bulge Reverse Complement miR
acgtcctctactctctactccagcaac

SEQ ID NO: 869 - DNA, 27 bp, Artificial sequence
  Bulge Reverse Complement miR
ctcccctggttctgctaccttcagcca

SEQ ID NO: 870 - DNA, 27 bp, Artificial sequence
  Bulge Reverse Complement miR
gtcctgttcttcctctactctaccaca

SEQ ID NO: 871 - DNA, 27 bp, Artificial sequence
  Bulge Reverse Complement miR
ccgtcggaaataaactagagagtccct

SEQ ID NO: 872 - DNA, 27 bp, Artificial sequence
  Bulge Reverse Complement miR
ccgcgctcccaggactaaacgaaccct

SEQ ID NO: 873 - DNA, 27 bp, Artificial sequence
  Bulge Reverse Complement miR
gccgttccatccctctagattctagga

SEQ ID NO: 874 - DNA, 27 bp, Artificial sequence
  Bulge Reverse Complement miR
gcgccatcgaacagctaagagctccca

SEQ ID NO: 875 - DNA, 27 bp, Artificial sequence
  Bulge Reverse Complement miR
atatcgcgctgctactaccttcgtctt

SEQ ID NO: 876 - DNA, 27 bp, Artificial sequence
  Bulge Reverse Complement miR
gtccatctcactgcctacccgtttctt

SEQ ID NO: 877 - DNA, 28 bp, Artificial sequence
  Bulge Reverse Complement miR
aattcaattcggctcctaaatcttttct

SEQ ID NO: 878 - DNA, 27 bp, Artificial sequence
  Bulge Reverse Complement miR
cctccttctctcatctacagtctggct

SEQ ID NO: 879 - DNA, 25 bp, Artificial sequence
  Bulge Reverse Complement miR
cccaccattagcctatacaggctct

SEQ ID NO: 880 - DNA, 27 bp, Artificial sequence
  Bulge Reverse Complement miR
cgtcctctacccttctaccaacaacgt

SEQ ID NO: 881 - DNA, 27 bp, Artificial sequence
  Bulge Reverse Complement miR
tgtgtcgttcttagctagccgctacct

SEQ ID NO: 882 - DNA, 24 bp, Artificial sequence
  Bulge Reverse Complement miR
aggcagcaactctagcataacttg

SEQ ID NO: 883 - DNA, 25 bp, Artificial sequence
  Bulge Reverse Complement miR
caccatctcttcctactccattctg

SEQ ID NO: 884 - DNA, 24 bp, Artificial sequence
  Bulge Reverse Complement miR
ggggcgacctgctaagaacacatg

SEQ ID NO: 885 - DNA, 27 bp, Artificial sequence
  Bulge Reverse Complement miR
agccgttccgttccctaagtatatagg

SEQ ID NO: 886 - DNA, 27 bp, Artificial sequence
  Bulge Reverse Complement miR
gggcaaccttctctctactccacagat

SEQ ID NO: 887 - DNA, 25 bp, Artificial sequence
  Bulge Reverse Complement miR
atactgcatggcctacccctgacat

SEQ ID NO: 888 - DNA, 27 bp, Artificial sequence
  Bulge Reverse Complement miR
gggccggcccggcactacagtcaggat

SEQ ID NO: 889 - DNA, 27 bp, Artificial sequence
  Bulge Reverse Complement miR
aagccgttccgttcctacagtatatag

SEQ ID NO: 890 - DNA, 25 bp, Artificial sequence
  Bulge Reverse Complement miR
agctttctctacctaggcgaactcg

SEQ ID NO: 891 - DNA, 27 bp, Artificial sequence
  Bulge Reverse Complement miR
gctcgctccagactctacgatctcgtc

SEQ ID NO: 892 - DNA, 25 bp, Artificial sequence
  Bulge Reverse Complement miR
tccctagtccctctaccccatactc

SEQ ID NO: 893 - DNA, 27 bp, Artificial sequence
  Bulge Reverse Complement miR
aaccctccttcgtcctacgaatcagtc

SEQ ID NO: 894 - DNA, 26 bp, Artificial sequence
  Bulge Reverse Complement miR
tgtgcttcgtttactagtgttcagac

SEQ ID NO: 895 - DNA, 27 bp, Artificial sequence
  Bulge Reverse Complement miR
gtcctctacccttcctacaacaacgtc

SEQ ID NO: 896 - DNA, 27 bp, Artificial sequence
  Bulge Reverse Complement miR
ggccggcccgtgaactactacagtagc

SEQ ID NO: 897 - DNA, 27 bp, Artificial sequence
  Bulge Reverse Complement miR
cctctcctgagcctctactatttcgtc

SEQ ID NO: 898 - DNA, 25 bp, Artificial sequence
  Bulge Reverse Complement miR
ccccatcgccaactatcacgaatcc

SEQ ID NO: 899 - DNA, 27 bp, Artificial sequence
  Bulge Reverse Complement miR
tgtcctgcctttccctagtttctcacc

SEQ ID NO: 900 - DNA, 28 bp, Artificial sequence
  Bulge Reverse Complement miR
aaccagaaacaggctctacacgaatacc

SEQ ID NO: 901 - DNA, 27 bp, Artificial sequence
  Bulge Reverse Complement miR
agccttctcaccctctagctcagacac

SEQ ID NO: 902 - DNA, 27 bp, Artificial sequence
  Bulge Reverse Complement miR
atccctcgcctacgctacctccaaaac

SEQ ID NO: 903 - DNA, 24 bp, Artificial sequence
  Bulge Reverse Complement miR
atcaacagatgctacagcgtccca

SEQ ID NO: 904 - DNA, 27 bp, Artificial sequence
  Bulge Reverse Complement miR
agccgttccgttccctaagtatataga

SEQ ID NO: 905 - DNA, 25 bp, Artificial sequence
  Bulge Reverse Complement miR
ctcaagatgcatctagctccttcca

SEQ ID NO: 906 - DNA, 27 bp, Artificial sequence
  Bulge Reverse Complement miR
gacgtcctctacccctactccaacaac

SEQ ID NO: 907 - DNA, 24 bp, Artificial sequence
  Bulge Reverse Complement miR
tgggtcttacactaaggtcaagaa

SEQ ID NO: 908 - DNA, 27 bp, Artificial sequence
  Bulge Reverse Complement miR
cccgtcccatcccgctatcctgtcatt

SEQ ID NO: 909 - DNA, 27 bp, Artificial sequence
  Bulge Reverse Complement miR
tattgtggtatgaactagccgttccgt

SEQ ID NO: 910 - DNA, 25 bp, Artificial sequence
  Bulge Reverse Complement miR
ccatctcttcctctaccattctgct

SEQ ID NO: 911 - DNA, 27 bp, Artificial sequence
  Bulge Reverse Complement miR
tcctccttctgcaactacagtgtccag

SEQ ID NO: 912 - DNA, 27 bp, Artificial sequence
  Bulge Reverse Complement miR
tcatccctcctcctctaatcctatttc

SEQ ID NO: 913 - DNA, 27 bp, Artificial sequence
  Bulge Reverse Complement miR
ccgtgctctaaatgctatcggcccgtc

SEQ ID NO: 914 - DNA, 27 bp, Artificial sequence
  Bulge Reverse Complement miR
gcccgtgagtctgtctatagtcgtgcc

SEQ ID NO: 915 - DNA, 22 bp, Artificial sequence
  Bulge Reverse Complement miR
tggaggttcctacaccgggatt

SEQ ID NO: 916 - DNA, 27 bp, Artificial sequence
  Bulge Reverse Complement miR
tctctctcattcgtctacttgtcgtgt

SEQ ID NO: 917 - DNA, 23 bp, Artificial sequence
  Bulge Reverse Complement miR
cgtctcgaagctatcctcgtcgt

SEQ ID NO: 918 - DNA, 21 bp, Artificial sequence
  Bulge Reverse Complement miR
agagtaccctattttatccgt

SEQ ID NO: 919 - DNA, 25 bp, Artificial sequence
  Bulge Reverse Complement miR
gccctccagtttctatcgacatact

SEQ ID NO: 920 - DNA, 22 bp, Artificial sequence
  Bulge Reverse Complement miR
agagttagcctacggtgcttat

SEQ ID NO: 921 - DNA, 27 bp, Artificial sequence
  Bulge Reverse Complement miR
tgccaataaccacgctacccgctgaat

SEQ ID NO: 922 - DNA, 22 bp, Artificial sequence
  Bulge Reverse Complement miR
ctccggcacctagaccactttg

SEQ ID NO: 923 - DNA, 23 bp, Artificial sequence
  Bulge Reverse Complement miR
atcgactatgctagcacccgctg

SEQ ID NO: 924 - DNA, 23 bp, Artificial sequence
  Bulge Reverse Complement miR
gcggcccgatctatctcaagctg

SEQ ID NO: 925 - DNA, 23 bp, Artificial sequence
  Bulge Reverse Complement miR
agagcagcccctagtgtcgcaaa

SEQ ID NO: 926 - DNA, 21 bp, Artificial sequence
  Bulge Reverse Complement miR
ttgaggacctacgtcgcaatg

SEQ ID NO: 927 - DNA, 22 bp, Artificial sequence
  Bulge Reverse Complement miR
tcctcctctctatgtcacaggg

SEQ ID NO: 928 - DNA, 26 bp, Artificial sequence
  Bulge Reverse Complement miR
gctccgcataactctaagttagcagg

SEQ ID NO: 929 - DNA, 22 bp, Artificial sequence
  Bulge Reverse Complement miR
ggtttcactctatctgagttcg

SEQ ID NO: 930 - DNA, 24 bp, Artificial sequence
  Bulge Reverse Complement miR
gcccttctcctctatgacgaagcg

SEQ ID NO: 931 - DNA, 22 bp, Artificial sequence
  Bulge Reverse Complement miR
gtaccttttctaatccgttgag

SEQ ID NO: 932 - DNA, 29 bp, Artificial sequence
  Bulge Reverse Complement miR
accctgcaacttaacgctacccagttaag

SEQ ID NO: 933 - DNA, 22 bp, Artificial sequence
  Bulge Reverse Complement miR
agccaacatctacctgactgtc

SEQ ID NO: 934 - DNA, 25 bp, Artificial sequence
  Bulge Reverse Complement miR
cgccgacaccgactaaggatcagtc

SEQ ID NO: 935 - DNA, 27 bp, Artificial sequence
  Bulge Reverse Complement miR
tcgtctcgtcttttctaaatcttcggc

SEQ ID NO: 936 - DNA, 23 bp, Artificial sequence
  Bulge Reverse Complement miR
tcaggatggtctacggcaaaggc

SEQ ID NO: 937 - DNA, 25 bp, Artificial sequence
  Bulge Reverse Complement miR
atccacgattacctatagcgattcc

SEQ ID NO: 938 - DNA, 23 bp, Artificial sequence
  Bulge Reverse Complement miR
ggtacaccagctaaggttcgtcc

SEQ ID NO: 939 - DNA, 23 bp, Artificial sequence
  Bulge Reverse Complement miR
cccacgaccactagagctgctcc

SEQ ID NO: 940 - DNA, 24 bp, Artificial sequence
  Bulge Reverse Complement miR
tttgaacatagctatcgagcctcc

SEQ ID NO: 941 - DNA, 25 bp, Artificial sequence
  Bulge Reverse Complement miR
gcccatgttctcctaacatccctcc

SEQ ID NO: 942 - DNA, 22 bp, Artificial sequence
  Bulge Reverse Complement miR
ccctcagttctactccagcgcc

SEQ ID NO: 943 - DNA, 22 bp, Artificial sequence
  Bulge Reverse Complement miR
agtctttatctattaggccccc

SEQ ID NO: 944 - DNA, 22 bp, Artificial sequence
  Bulge Reverse Complement miR
gcctctagactacgaaggggac

SEQ ID NO: 945 - DNA, 23 bp, Artificial sequence
  Bulge Reverse Complement miR
accaactacactaccactcagac

SEQ ID NO: 946 - DNA, 23 bp, Artificial sequence
  Bulge Reverse Complement miR
ttcacgacggctaacgttagcac

SEQ ID NO: 947 - DNA, 21 bp, Artificial sequence
  Bulge Reverse Complement miR
gccaactgctactctaccaac

SEQ ID NO: 948 - DNA, 24 bp, Artificial sequence
  Bulge Reverse Complement miR
tgtacaagaccctacgggaacgta

SEQ ID NO: 949 - DNA, 23 bp, Artificial sequence
  Bulge Reverse Complement miR
ccctcccgaactaggttaagcta

SEQ ID NO: 950 - DNA, 23 bp, Artificial sequence
  Bulge Reverse Complement miR
cacccccatcctattcatccata

SEQ ID NO: 951 - DNA, 25 bp, Artificial sequence
  Bulge Reverse Complement miR
cggagtacctttctatatccgttga

SEQ ID NO: 952 - DNA, 25 bp, Artificial sequence
  Bulge Reverse Complement miR
tgagccttctctctattctttctca

SEQ ID NO: 953 - DNA, 26 bp, Artificial sequence
  Bulge Reverse Complement miR
gcccagaacatctctaaaggacatca

SEQ ID NO: 954 - DNA, 21 bp, Artificial sequence
  Bulge Reverse Complement miR
cattcaaactagcactgggca

SEQ ID NO: 955 - DNA, 24 bp, Artificial sequence
  Bulge Reverse Complement miR
gctcgacttgtctacggtctcgca

SEQ ID NO: 956 - DNA, 23 bp, Artificial sequence
  Bulge Reverse Complement miR
agagcagcccctagtgtcgcaaa

SEQ ID NO: 957 - DNA, 25 bp, Artificial sequence
  Bulge Reverse Complement miR
atgtgtcttcggctatttctctttt

SEQ ID NO: 958 - DNA, 25 bp, Artificial sequence
  Bulge Reverse Complement miR
catgctactcctctacatcctcttt

SEQ ID NO: 959 - DNA, 25 bp, Artificial sequence
  Bulge Reverse Complement miR
agcccaagcacgctaacacgacgtt

SEQ ID NO: 960 - DNA, 24 bp, Artificial sequence
  Bulge Reverse Complement miR
cctcctcaaccctacatgtgtatt

SEQ ID NO: 961 - DNA, 25 bp, Artificial sequence
  Bulge Reverse Complement miR
aatctcatgtatctatggtccaggt

SEQ ID NO: 962 - DNA, 25 bp, Artificial sequence
  Bulge Reverse Complement miR
actccgtcccatctatgtcgcttct

SEQ ID NO: 963 - DNA, 25 bp, Artificial sequence
  Bulge Reverse Complement miR
gcctccttggcactagtccgcttct

SEQ ID NO: 964 - DNA, 26 bp, Artificial sequence
  Bulge Reverse Complement miR
gtccctctatcccctacaaaccctct

SEQ ID NO: 965 - DNA, 26 bp, Artificial sequence
  Bulge Reverse Complement miR
cttatcctcgtttctagttccttcct

SEQ ID NO: 966 - DNA, 24 bp, Artificial sequence
  Bulge Reverse Complement miR
atcccattgcgctatcagcatcct

SEQ ID NO: 967 - DNA, 25 bp, Artificial sequence
  Bulge Reverse Complement miR
gtccccaatagcctactcacatcct

SEQ ID NO: 968 - DNA, 24 bp, Artificial sequence
  Bulge Reverse Complement miR
catgctctgccctatcatccctat

SEQ ID NO: 969 - DNA, 25 bp, Artificial sequence
  Bulge Reverse Complement miR
cggtgacgggtactacaaatagcat

SEQ ID NO: 970 - DNA, 25 bp, Artificial sequence
  Bulge Reverse Complement miR
tcatccctccttctattatccacat

SEQ ID NO: 971 - DNA, 25 bp, Artificial sequence
  Bulge Reverse Complement miR
atggtcctccttctagttcctgttg

SEQ ID NO: 972 - DNA, 25 bp, Artificial sequence
  Bulge Reverse Complement miR
gctctgcccttcctacatctcttgg

SEQ ID NO: 973 - DNA, 25 bp, Artificial sequence
  Bulge Reverse Complement miR
gcctggtctgccctactcgacttgg

SEQ ID NO: 974 - DNA, 24 bp, Artificial sequence
  Bulge Reverse Complement miR
ttgaactccgtctacccgttgtcg

SEQ ID NO: 975 - DNA, 24 bp, Artificial sequence
  Bulge Reverse Complement miR
agcatctctttctactcaactcag

SEQ ID NO: 976 - DNA, 25 bp, Artificial sequence
  Bulge Reverse Complement miR
atgcaactccacctactcccatcag

SEQ ID NO: 977 - DNA, 26 bp, Artificial sequence
  Bulge Reverse Complement miR
accaaaatgttccctaatcttcccag

SEQ ID NO: 978 - DNA, 25 bp, Artificial sequence
  Bulge Reverse Complement miR
ctcctcatcatcctagtatatcttc

SEQ ID NO: 979 - DNA, 24 bp, Artificial sequence
  Bulge Reverse Complement miR
atgagcccaaactacgatagattc

SEQ ID NO: 980 - DNA, 24 bp, Artificial sequence
  Bulge Reverse Complement miR
cgaatccttttctagtagctcgtc

SEQ ID NO: 981 - DNA, 25 bp, Artificial sequence
  Bulge Reverse Complement miR
tctgacgtacctctactccatcctc

SEQ ID NO: 982 - DNA, 25 bp, Artificial sequence
  Bulge Reverse Complement miR
cctactctcactctacctcgtcatc

SEQ ID NO: 983 - DNA, 26 bp, Artificial sequence
  Bulge Reverse Complement miR
cacacgacgctctctacctacccatc

SEQ ID NO: 984 - DNA, 25 bp, Artificial sequence
  Bulge Reverse Complement miR
ctaccgtcacctctaatgaaccatc

SEQ ID NO: 985 - DNA, 25 bp, Artificial sequence
  Bulge Reverse Complement miR
acatctctatgtctactcggctccc

SEQ ID NO: 986 - DNA, 26 bp, Artificial sequence
  Bulge Reverse Complement miR
tgtcctcctgccactagaagatgccc

SEQ ID NO: 987 - DNA, 25 bp, Artificial sequence
  Bulge Reverse Complement miR
ccgtctcattatctacactcctcac

SEQ ID NO: 988 - DNA, 26 bp, Artificial sequence
  Bulge Reverse Complement miR
ataaacctgctaactaagccccaaac

SEQ ID NO: 989 - DNA, 24 bp, Artificial sequence
  Bulge Reverse Complement miR
aaaacttgctcctattcttccgta

SEQ ID NO: 990 - DNA, 25 bp, Artificial sequence
  Bulge Reverse Complement miR
ctttgttctctcctagctctttcta

SEQ ID NO: 991 - DNA, 25 bp, Artificial sequence
  Bulge Reverse Complement miR
atctcttccgccctacagctatgga

SEQ ID NO: 992 - DNA, 24 bp, Artificial sequence
  Bulge Reverse Complement miR
cacctatcctactacacatgccga

SEQ ID NO: 993 - DNA, 25 bp, Artificial sequence
  Bulge Reverse Complement miR
cgcttccacaccctacagcctatca

SEQ ID NO: 994 - DNA, 24 bp, Artificial sequence
  Bulge Reverse Complement miR
aaccagtcgtcctacataatatca

SEQ ID NO: 995 - DNA, 25 bp, Artificial sequence
  Bulge Reverse Complement miR
tcgcctccccagctatctgtttgca

SEQ ID NO: 996 - DNA, 24 bp, Artificial sequence
  Bulge Reverse Complement miR
ctcctcggcatctaggcccttcca

SEQ ID NO: 997 - DNA, 24 bp, Artificial sequence
  Bulge Reverse Complement miR
gctcatcaacgctactgcgctcaa

SEQ ID NO: 998 - DNA, 26 bp, Artificial sequence
  Bulge Reverse Complement miR
actccaaactaccctacgttatccaa

SEQ ID NO: 999 - DNA, 25 bp, Artificial sequence
  Bulge Reverse Complement miR
ctcccttatcctctagtcagccaaa

SEQ ID NO: 1000 - DNA, 25 bp, Artificial sequence
  Bulge Reverse Complement miR
ctcttccgcccactagctatgaaaa

SEQ ID NO: 1001 - DNA, 27 bp, Artificial sequence
  Bulge Reverse Complement miR
gcgccgtcctacctctaatttaaagtt

SEQ ID NO: 1002 - DNA, 24 bp, Artificial sequence
  Bulge Reverse Complement miR
tgggtgaatgactagtcggcagct

SEQ ID NO: 1003 - DNA, 24 bp, Artificial sequence
  Bulge Reverse Complement miR
ccttgaaccagctaacaacattcc

SEQ ID NO: 1004 - DNA, 25 bp, Artificial sequence
  Bulge Reverse Complement miR
gtggccttccgcctagaacattaca

SEQ ID NO: 1005 - DNA, 25 bp, Artificial sequence
  Bulge Reverse Complement miR
acctcctcctgactatcatcgtaca

SEQ ID NO: 1006 - DNA, 24 bp, Artificial sequence
  Bulge Reverse Complement miR
cgggggcgaccctatgagaacaca

SEQ ID NO: 1007 - DNA, 24 bp, Artificial sequence
  Bulge Reverse Complement miR
gttgattgagcctacatgccaaca

SEQ ID NO: 1008 - DNA, 24 bp, Artificial sequence
  Bulge Reverse Complement miR
ctccctctgttctatctttttagt

SEQ ID NO: 1009 - DNA, 25 bp, Artificial sequence
  Bulge Reverse Complement miR
atgaggtggcacctaggcgtcagcg

SEQ ID NO: 1010 - DNA, 23 bp, Artificial sequence
  Bulge Reverse Complement miR
gcagaagggtctacgagccggtc

SEQ ID NO: 1011 - DNA, 23 bp, Artificial sequence
  Bulge Reverse Complement miR
aggtctaaagctaaggcccaggc

SEQ ID NO: 1012 - DNA, 25 bp, Artificial sequence
  Bulge Reverse Complement miR
gaaccctctccactatccatcctac

SEQ ID NO: 1013 - DNA, 24 bp, Artificial sequence
  Bulge Reverse Complement miR
cgggcaaatcactatgcttggcta

SEQ ID NO: 1014 - DNA, 23 bp, Artificial sequence
  Bulge Reverse Complement miR
cacatccgccctaagcccgttga

SEQ ID NO: 1015 - DNA, 25 bp, Artificial sequence
  Bulge Reverse Complement miR
accctctccatcctacatcctacca

SEQ ID NO: 1016 - DNA, 25 bp, Artificial sequence
  Bulge Reverse Complement miR
tgtagccaaggactacagacttgcc

SEQ ID NO: 1017 - DNA, 24 bp, Artificial sequence
  Bulge Reverse Complement miR
caggcaaatcactatccctggcta

SEQ ID NO: 1018 - DNA, 24 bp, Artificial sequence
  Bulge Reverse Complement miR
caggcaaatcactatccctggcta

SEQ ID NO: 1019 - DNA, 24 bp, Artificial sequence
  Bulge Reverse Complement miR
atgcagcatcactatcaagattcc

SEQ ID NO: 1020 - DNA, 24 bp, Artificial sequence
  Bulge Reverse Complement miR
catcaacgctgctacgctcaatga

SEQ ID NO: 1021 - DNA, 24 bp, Artificial sequence
  Bulge Reverse Complement miR
catgtgttcccctaagtccgcccc

SEQ ID NO: 1022 - DNA, 25 bp, Artificial sequence
  Bulge Reverse Complement miR
tctgccaaaggactagaagttgccc

SEQ ID NO: 1023 - DNA, 24 bp, Artificial sequence
  Bulge Reverse Complement miR
ccgggcaaatcctaccctttggca

SEQ ID NO: 1024 - DNA, 24 bp, Artificial sequence
  Bulge Reverse Complement miR
aggctgtactcctatctctcttct

SEQ ID NO: 1025 - DNA, 24 bp, Artificial sequence
  Bulge Reverse Complement miR
tgtttgctgatctaggtcatctaa

SEQ ID NO: 1026 - DNA, 20 bp, Artificial sequence
  Single strand DNA oligonucleotide
tttagcgatgaacttcactc

SEQ ID NO: 1027 - DNA, 21 bp, Zea mays
ggggcgaactgagaacacatg

SEQ ID NO: 1028 - DNA, 21 bp, Arabidopsis lyrata
gggtcgacatgagaacatatg

SEQ ID NO: 1029 - DNA, 22 bp, Brachypodium distachyon
caggagtgtcactgagaacaca

SEQ ID NO: 1030 - DNA, 21 bp, Arabidopsis lyrata
gggttgatatgaggacacatg

SEQ ID NO: 1031 - DNA, 21 bp, Arabidopsis lyrata
ggagtgtcatgagaacacaga

SEQ ID NO: 1032 - DNA, 21 bp, Arabidopsis lyrata
ggcaagttgtccttggctaca

SEQ ID NO: 1033 - DNA, 21 bp, Zea mays
ggcaagttgtccttggctaca

SEQ ID NO: 1034 - DNA, 21 bp, Zea mays
ggcaagttgttcttggctaca

SEQ ID NO: 1035 - DNA, 21 bp, Zea mays
ggcaagttgttcttggctaca

SEQ ID NO: 1036 - DNA, 21 bp, Zea mays
ggcatgtcttccttggctact

SEQ ID NO: 1037 - DNA, 21 bp, Arabidopsis thaliana
tccggcaagttgaccttggct

SEQ ID NO: 1038 - DNA, 22 bp, Arabidopsis lyrata
ggcaagttgtccttcggctaca

SEQ ID NO: 1039 - DNA, 21 bp, Arabidopsis lyrata
ggcaagtcatctctggctatg

SEQ ID NO: 1040 - DNA, 21 bp, Arabidopsis lyrata
gcaagttgaccttggctctgt

SEQ ID NO: 1041 - DNA, 21 bp, Arabidopsis lyrata
gcaagttgaccttggctctgt

SEQ ID NO: 1042 - DNA, 21 bp, Arabidopsis lyrata
gcaagttgaccttggctctgc

SEQ ID NO: 1043 - DNA, 21 bp, Arabidopsis lyrata
gcaagttgaccttggctctgt

SEQ ID NO: 1044 - DNA, 20 bp, Zea mays
ggcaggtcttcttggctagc

SEQ ID NO: 1045 - DNA, 21 bp, Zea mays
ggcaagtcatctggggctacg

SEQ ID NO: 1046 - DNA, 19 bp, Arabidopsis lyrata
ggcagtctccttggctatt

SEQ ID NO: 1047 - DNA, 19 bp, Arabidopsis lyrata
ggcagtctccttggctatc

SEQ ID NO: 1048 - DNA, 19 bp, Arabidopsis lyrata
ggcagtctccttggctatc

SEQ ID NO: 1049 - DNA, 19 bp, Arabidopsis lyrata
ggcagtctccttggctatc

SEQ ID NO: 1050 - DNA, 18 bp, Zea mays
ggcagtctccttggctag

SEQ ID NO: 1051 - DNA, 18 bp, Zea mays
ggcagtctccttggctag

SEQ ID NO: 1052 - DNA, 18 bp, Zea mays
ggcagtctccttggctag

SEQ ID NO: 1053 - DNA, 20 bp, Zea mays
ggcaaatcatccctgctacc

SEQ ID NO: 1054 - DNA, 20 bp, Zea mays
ggcatccattcttggctaag

SEQ ID NO: 1055 - DNA, 20 bp, Zea mays
ggcaggccttcttggctaag

SEQ ID NO: 1056 - DNA, 19 bp, Arabidopsis lyrata
ggcagtctccttggatatc

SEQ ID NO: 1057 - DNA, 19 bp, Arabidopsis lyrata
ggcagtcttcttggctatc

SEQ ID NO: 1058 - DNA, 19 bp, Arabidopsis lyrata
ggcagtctctttggctatc

SEQ ID NO: 1059 - DNA, 21 bp, Aquilegia caerulea
tagccaaggatgacttgccta

SEQ ID NO: 1060 - DNA, 21 bp, Brachypodium distachyon
tagccaagaatgacttgccta

SEQ ID NO: 1061 - DNA, 21 bp, Brachypodium distachyon
tagccaaggatgacttgccta

SEQ ID NO: 1062 - DNA, 22 bp, Brachypodium distachyon
ccagccaagaatggcttgccta

SEQ ID NO: 1063 - DNA, 21 bp, Brassica napus
tagccaaggatgacttgccta

SEQ ID NO: 1064 - DNA, 21 bp, Brassica napus
tagccaaggatgacttgccta

SEQ ID NO: 1065 - DNA, 21 bp, Brassica napus
tagccaaggatgacttgccta

SEQ ID NO: 1066 - DNA, 21 bp, Brassica napus
tagccaaggatgacttgccta

SEQ ID NO: 1067 - DNA, 22 bp, Brassica napus
tagccaaggatgacttgcctgc

SEQ ID NO: 1068 - DNA, 22 bp, Brassica napus
tagccaaggatgacttgcctgc

SEQ ID NO: 1069 - DNA, 22 bp, Brassica napus
tagccaaggatgacttgcctgc

SEQ ID NO: 1070 - DNA, 22 bp, Brassica napus
tagccaaggatgacttgcctgc

SEQ ID NO: 1071 - DNA, 22 bp, Brassica napus
tagccaaggatgacttgcctgc

SEQ ID NO: 1072 - DNA, 22 bp, Brassica napus
tagccaaggatgacttgcctgc

SEQ ID NO: 1073 - DNA, 21 bp, Festuca arundinacea
tagccaaggatgacttgccta

SEQ ID NO: 1074 - DNA, 21 bp, Medicago truncatula
aagccaaggatgacttgccta

SEQ ID NO: 1075 - DNA, 21 bp, Oryza sativa
tagccaaggatgacttgccta

SEQ ID NO: 1076 - DNA, 21 bp, Oryza sativa
tagccaaggatgacttgccta

SEQ ID NO: 1077 - DNA, 21 bp, Oryza sativa
tagccaagaatgacttgccta

SEQ ID NO: 1078 - DNA, 21 bp, Oryza sativa
tagccaagaatgacttgccta

SEQ ID NO: 1079 - DNA, 21 bp, Populus trichocarpa
tagccaaggatgacttgccta

SEQ ID NO: 1080 - DNA, 21 bp, Sorghum bicolor
tagccaaggatgacttgccta

SEQ ID NO: 1081 - DNA, 21 bp, Sorghum bicolor
tagccaaggatgacttgccta

SEQ ID NO: 1082 - DNA, 21 bp, Sorghum bicolor
tagccaagaatgacttgccta

SEQ ID NO: 1083 - DNA, 21 bp, Sorghum bicolor
tagccaaggatgacttgccta

SEQ ID NO: 1084 - DNA, 21 bp, Sorghum bicolor
tagccaaggatgacttgccta

SEQ ID NO: 1085 - DNA, 21 bp, Sorghum bicolor
tagccaagaatggcttgccta

SEQ ID NO: 1086 - DNA, 21 bp, Sorghum bicolor
tagccaagaatggcttgccta

SEQ ID NO: 1087 - DNA, 21 bp, Solanum lycopersicum
tagccaaggatgacttgccta

SEQ ID NO: 1088 - DNA, 21 bp, Theobroma cacao
tagccaaggatgacttgccta

SEQ ID NO: 1089 - DNA, 21 bp, Vitis vinifera
tagccaaggatgacttgccta

SEQ ID NO: 1090 - DNA, 21 bp, Zea mays
tagccaaggatgacttgccta

SEQ ID NO: 1091 - DNA, 21 bp, Zea mays
tagccaaggatgacttgccta

SEQ ID NO: 1092 - DNA, 21 bp, Zea mays
tagccaaggatgacttgccta

SEQ ID NO: 1093 - DNA, 21 bp, Zea mays
tagccaagaatggcttgccta

SEQ ID NO: 1094 - DNA, 21 bp, Sorghum bicolor
tagccaaggatgacttgccta

SEQ ID NO: 1095 - DNA, 22 bp, Vitis vinifera
tagccaaggatgacttgcctgc

SEQ ID NO: 1096 - DNA, 21 bp, Zea mays
tagccaagaatggcttgccta

SEQ ID NO: 1097 - DNA, 21 bp, Zea mays
tagccaagaatgacttgccta

SEQ ID NO: 1098 - DNA, 21 bp, Zea mays
tagccaagaatggcttgccta

SEQ ID NO: 1099 - DNA, 21 bp, Zea mays
tagccagggatgatttgcctg

SEQ ID NO: 1100 - DNA, 23 bp, Glycine max
tgagccaaggatgacttgccggt

SEQ ID NO: 1101 - DNA, 21 bp, Arabidopsis lyrata
tgagccaaggatgacttgccg

SEQ ID NO: 1102 - DNA, 21 bp, Arabidopsis thaliana
tgagccaaggatgacttgccg

SEQ ID NO: 1103 - DNA, 21 bp, Arabidopsis thaliana
tgagccaaggatgacttgccg

SEQ ID NO: 1104 - DNA, 21 bp, Vitis vinifera
gagccaaggatgacttgccgg

SEQ ID NO: 1105 - DNA, 21 bp, Arabidopsis lyrata
tgagccaaggatgacttgccg

SEQ ID NO: 1106 - DNA, 21 bp, Arabidopsis lyrata
tgagccaaggatgacttgccg

SEQ ID NO: 1107 - DNA, 21 bp, Arabidopsis thaliana
tgagccaaggatgacttgccg

SEQ ID NO: 1108 - DNA, 21 bp, Arabidopsis thaliana
tgagccaaggatgacttgccg

SEQ ID NO: 1109 - DNA, 21 bp, Ricinus communis
tgagccaaggatgacttgccg

SEQ ID NO: 1110 - DNA, 21 bp, Medicago truncatula
tgagccaggatggcttgccgg

SEQ ID NO: 1111 - DNA, 21 bp, Arabidopsis lyrata
tgagccaaggatgacttgccg

SEQ ID NO: 1112 - DNA, 21 bp, Vitis vinifera
gagccaaggatgacttgccgg

SEQ ID NO: 1113 - DNA, 21 bp, Vitis vinifera
gagccaaggatgacttgccgg

SEQ ID NO: 1114 - DNA, 21 bp, Populus trichocarpa
tgagccaaggatgacttgccg

SEQ ID NO: 1115 - DNA, 21 bp, Vitis vinifera
gagccaaggatgacttgccgg

SEQ ID NO: 1116 - DNA, 21 bp, Theobroma cacao
tgagccaaggatgacttgccg

SEQ ID NO: 1117 - DNA, 21 bp, Medicago truncatula
gagccaaggatgacttgccgg

SEQ ID NO: 1118 - DNA, 21 bp, Brassica napus
tgagccaaagatgacttgccg

SEQ ID NO: 1119 - DNA, 20 bp, Glycine max
agccaaggatgacttgccgg

SEQ ID NO: 1120 - DNA, 21 bp, Vitis vinifera
tgagccaaggatggcttgccg

SEQ ID NO: 1121 - DNA, 21 bp, Medicago truncatula
gagccaaagatgacttgccgg

SEQ ID NO: 1122 - DNA, 21 bp, Medicago truncatula
ggagccaaggatgacttgccg

SEQ ID NO: 1123 - DNA, 21 bp, Populus trichocarpa
gagccaagaatgacttgccgg

SEQ ID NO: 1124 - DNA, 21 bp, Vitis vinifera
gagccaaggatgacttgccgc

SEQ ID NO: 1125 - DNA, 21 bp, Vitis vinifera
tgagtcaaggatgacttgccg

SEQ ID NO: 1126 - DNA, 21 bp, Vitis vinifera
tgagtcaaggatgacttgccg

SEQ ID NO: 1127 - DNA, 21 bp, Vitis vinifera
tgagccaaggatggcttgccg

SEQ ID NO: 1128 - DNA, 21 bp, Vitis vinifera
gagccaaggatgacttgccgt

SEQ ID NO: 1129 - DNA, 21 bp, Medicago truncatula
tgagccaaagatgacttgccg

SEQ ID NO: 1130 - DNA, 21 bp, Medicago truncatula
tgagccaaagatgacttgccg

SEQ ID NO: 1131 - DNA, 21 bp, Medicago truncatula
tgagccaaagatgacttgccg

SEQ ID NO: 1132 - DNA, 21 bp, Medicago truncatula
aagccaaggatgacttgccgg

SEQ ID NO: 1133 - DNA, 21 bp, Populus trichocarpa
tcagccaaggatgacttgccg

SEQ ID NO: 1134 - DNA, 21 bp, Populus trichocarpa
gagccaagaatgacttgtcgg

SEQ ID NO: 1135 - DNA, 21 bp, Populus trichocarpa
aagccaaggatgacttgcctg

SEQ ID NO: 1136 - DNA, 21 bp, Populus trichocarpa
aagccaaggatgacttgcctg

SEQ ID NO: 1137 - DNA, 21 bp, Citrus sinensis
gagccaagaatgacttgccga

SEQ ID NO: 1138 - DNA, 20 bp, Antirrhinum majus
agccaaggatgacttgccga

SEQ ID NO: 1139 - DNA, 21 bp, Vitis vinifera
gagccaaggatgactggccgt

SEQ ID NO: 1140 - DNA, 21 bp, Vitis vinifera
cgagtcaaggatgacttgccg

SEQ ID NO: 1141 - DNA, 21 bp, Vitis vinifera
aagccaaggatgaattgccgg

SEQ ID NO: 1142 - DNA, 21 bp, Glycine max
aagccaaggatgacttgccga

SEQ ID NO: 1143 - DNA, 21 bp, Theobroma cacao
tgagtcaagaatgacttgccg

SEQ ID NO: 1144 - DNA, 21 bp, Medicago truncatula
aagccaaggatgacttgccta

SEQ ID NO: 1145 - DNA, 21 bp, Sorghum bicolor
tagccaaggatgacttgccgg

SEQ ID NO: 1146 - DNA, 21 bp, Populus trichocarpa
tagccatggatgaattgcctg

SEQ ID NO: 1147 - DNA, 21 bp, Saccharum officinarum
tagccaaggatgacttgccgg

SEQ ID NO: 1148 - DNA, 21 bp, Hordeum vulgare
aagccaaggatgagttgcctg

SEQ ID NO: 1149 - DNA, 21 bp, Saccharum ssp.
tagccaaggatgacttgccgg

SEQ ID NO: 1150 - DNA, 21 bp, Zea mays
tagccaaggatgacttgccgg

SEQ ID NO: 1151 - DNA, 21 bp, Oryza sativa
tagccaaggatgacttgccgg

SEQ ID NO: 1152 - DNA, 21 bp, Brachypodium distachyon
tagccaaggatgacttgccgg

SEQ ID NO: 1153 - DNA, 21 bp, Theobroma cacao
aagccaagaatgacttgcctg

SEQ ID NO: 1154 - DNA, 21 bp, Solanum lycopersicum
tagccaaggatgacttgcctg

SEQ ID NO: 1155 - DNA, 21 bp, Brachypodium distachyon
cagccaaggatgacttgccgg

SEQ ID NO: 1156 - DNA, 21 bp, Populus trichocarpa
cagccaaggatgacttgccgg

SEQ ID NO: 1157 - DNA, 21 bp, Oryza sativa
tagccaaggatgacttgcctg

SEQ ID NO: 1158 - DNA, 21 bp, Oryza sativa
tagccaaggatgacttgcctg

SEQ ID NO: 1159 - DNA, 21 bp, Arabidopsis thaliana
tagccaaggatgacttgcctg

SEQ ID NO: 1160 - DNA, 21 bp, Oryza sativa
tagccaaggatgacttgcctg

SEQ ID NO: 1161 - DNA, 21 bp, Populus trichocarpa
tagccaaggatgacttgcctg

SEQ ID NO: 1162 - DNA, 21 bp, Populus trichocarpa
tagccaaggatgacttgcctg

SEQ ID NO: 1163 - DNA, 21 bp, Populus trichocarpa
tagccaaggatgacttgcctg

SEQ ID NO: 1164 - DNA, 21 bp, Populus trichocarpa
tagccaaggatgacttgcctg

SEQ ID NO: 1165 - DNA, 21 bp, Populus trichocarpa
tagccaaggatgacttgcctg

SEQ ID NO: 1166 - DNA, 21 bp, Oryza sativa
tagccaaggatgacttgcctg

SEQ ID NO: 1167 - DNA, 21 bp, Arabidopsis thaliana
cagccaaggatgacttgccgg

SEQ ID NO: 1168 - DNA, 21 bp, Oryza sativa
tagccaaggatgacttgcctg

SEQ ID NO: 1169 - DNA, 21 bp, Arabidopsis lyrata
tagccaaggatgacttgcctg

SEQ ID NO: 1170 - DNA, 21 bp, Arabidopsis thaliana
tagccaaggatgacttgcctg

SEQ ID NO: 1171 - DNA, 21 bp, Populus trichocarpa
cagccaaggatgacttgccgg

SEQ ID NO: 1172 - DNA, 21 bp, Gossypium herbacium
tagccaaggatgacttgcctg

SEQ ID NO: 1173 - DNA, 21 bp, Aquilegia caerulea
tagccaaggatgacttgcctg

SEQ ID NO: 1174 - DNA, 21 bp, Arabidopsis thaliana
tagccaaggatgacttgcctg

SEQ ID NO: 1175 - DNA, 21 bp, Arabidopsis lyrata
tagccaaggatgacttgcctg

SEQ ID NO: 1176 - DNA, 21 bp, Ricinus communis
cagccaaggatgacttgccgg

SEQ ID NO: 1177 - DNA, 21 bp, Arabidopsis lyrata
tagccaaggatgacttgcctg

SEQ ID NO: 1178 - DNA, 22 bp, Brassica napus
tagccaaggatgacttgcctgc

SEQ ID NO: 1179 - DNA, 21 bp, Arabidopsis lyrata
cagccaaggatgacttgccgg

SEQ ID NO: 1180 - DNA, 22 bp, Vitis vinifera
tagccaaggatgacttgcctgc

SEQ ID NO: 1181 - DNA, 21 bp, Arabidopsis lyrata
cagccaaggatgacttgccgg

SEQ ID NO: 1182 - DNA, 21 bp, Oryza sativa
tagccaaggatgacttgcctg

SEQ ID NO: 1183 - DNA, 21 bp, Vitis vinifera
cagccaaggatgacttgccgg

SEQ ID NO: 1184 - DNA, 21 bp, Brachypodium distachyon
tagccaaggatgacttgcctg

SEQ ID NO: 1185 - DNA, 21 bp, Solanum lycopersicum
cagccaaggatgacttgccgg

SEQ ID NO: 1186 - DNA, 21 bp, Brachypodium distachyon
cagccaaggatgacttgccgg

SEQ ID NO: 1187 - DNA, 21 bp, Vitis vinifera
cagccaaggatgacttgccgg

SEQ ID NO: 1188 - DNA, 21 bp, Theobroma cacao
cagccaaggatgacttgccgg

SEQ ID NO: 1189 - DNA, 21 bp, Zea mays
tagccaaggatgacttgcctg

SEQ ID NO: 1190 - DNA, 21 bp, Sorghum bicolor
tagccaaggatgacttgcctg

SEQ ID NO: 1191 - DNA, 21 bp, Zea mays
cagccaaggatgacttgccgg

SEQ ID NO: 1192 - DNA, 21 bp, Zea mays
tagccaaggatgacttgcctg

SEQ ID NO: 1193 - DNA, 21 bp, Arabidopsis thaliana
tagccaaggatgacttgcctg

SEQ ID NO: 1194 - DNA, 21 bp, Populus trichocarpa
cagccaaggatgacttgccgg

SEQ ID NO: 1195 - DNA, 21 bp, Medicago truncatula
cagccaaggatgacttgccgg

SEQ ID NO: 1196 - DNA, 21 bp, Populus trichocarpa
cagccaaggatgacttgccgg

SEQ ID NO: 1197 - DNA, 21 bp, Arabidopsis thaliana
tagccaaggatgacttgcctg

SEQ ID NO: 1198 - DNA, 21 bp, Populus trichocarpa
cagccaaggatgacttgccgg

SEQ ID NO: 1199 - DNA, 21 bp, Vitis vinifera
cagccaaggatgacttgccgg

SEQ ID NO: 1200 - DNA, 21 bp, Vitis vinifera
cagccaaggatgacttgccgg

SEQ ID NO: 1201 - DNA, 21 bp, Vitis vinifera
cagccaaggatgacttgccgg

SEQ ID NO: 1202 - DNA, 21 bp, Theobroma cacao
cagccaaggatgacttgccgg

SEQ ID NO: 1203 - DNA, 22 bp, Brassica napus
tagccaaggatgacttgcctgc

SEQ ID NO: 1204 - DNA, 22 bp, Brassica napus
tagccaaggatgacttgcctgc

SEQ ID NO: 1205 - DNA, 21 bp, Arabidopsis lyrata
tagccaaggatgacttgcctg

SEQ ID NO: 1206 - DNA, 21 bp, Ricinus communis
cagccaaggatgacttgccgg

SEQ ID NO: 1207 - DNA, 21 bp, Arabidopsis lyrata
tagccaaggatgacttgcctg

SEQ ID NO: 1208 - DNA, 21 bp, Arabidopsis thaliana
tagccaaggatgacttgcctg

SEQ ID NO: 1209 - DNA, 21 bp, Arabidopsis lyrata
tagccaaggatgacttgcctg

SEQ ID NO: 1210 - DNA, 21 bp, Oryza sativa
cagccaaggatgacttgccgg

SEQ ID NO: 1211 - DNA, 21 bp, Oryza sativa
cagccaaggatgacttgccgg

SEQ ID NO: 1212 - DNA, 21 bp, Vitis vinifera
cagccaaggatgacttgccgg

SEQ ID NO: 1213 - DNA, 21 bp, Brachypodium distachyon
tagccaggaatggcttgccta

SEQ ID NO: 1214 - DNA, 21 bp, Zea mays
tagccaaggatgacttgcctg

SEQ ID NO: 1215 - DNA, 21 bp, Sorghum bicolor
tagccaaggatgacttgcctg

SEQ ID NO: 1216 - DNA, 21 bp, Brachypodium distachyon
tagccaaggatgacttgcctg

SEQ ID NO: 1217 - DNA, 21 bp, Arabidopsis thaliana
cagccaaggatgacttgccgg

SEQ ID NO: 1218 - DNA, 22 bp, Brassica napus
tagccaaggatgacttgcctgc

SEQ ID NO: 1219 - DNA, 21 bp, Sorghum bicolor
cagccaaggatgacttgccgg

SEQ ID NO: 1220 - DNA, 21 bp, Glycine soja
cagccaaggatgacttgccgg

SEQ ID NO: 1221 - DNA, 21 bp, Glycine max
cagccaaggatgacttgccgg

SEQ ID NO: 1222 - DNA, 21 bp, Sorghum bicolor
cagccaaggatgacttgccgg

SEQ ID NO: 1223 - DNA, 21 bp, Oryza sativa
tagccaaggatgaattgccgg

SEQ ID NO: 1224 - DNA, 21 bp, Zea mays
cagccaaggatgacttgccgg

SEQ ID NO: 1225 - DNA, 21 bp, Arabidopsis thaliana
tagccaaggatgacttgcctg

SEQ ID NO: 1226 - DNA, 21 bp, Medicago truncatula
cagccaaggatgacttgccgg

SEQ ID NO: 1227 - DNA, 21 bp, Petunia x hybrida
cagccaaggatgacttgccgg

SEQ ID NO: 1228 - DNA, 21 bp, Theobroma cacao
tagccaaggatgacttgcctg

SEQ ID NO: 1229 - DNA, 21 bp, Theobroma cacao
tagccaaggatgacttgcctg

SEQ ID NO: 1230 - DNA, 22 bp, Brassica napus
tagccaaggatgacttgcctgc

SEQ ID NO: 1231 - DNA, 21 bp, Aquilegia caerulea
cagccaaggatgacttgccgg

SEQ ID NO: 1232 - DNA, 21 bp, Theobroma cacao
cagccaaggatgacttgccgg

SEQ ID NO: 1233 - DNA, 21 bp, Glycine max
cagccaaggatgacttgccgg

SEQ ID NO: 1234 - DNA, 22 bp, Brassica napus
tagccaaggatgacttgcctgc

SEQ ID NO: 1235 - DNA, 21 bp, Brassica napus
cagccaaggatgacttgccga

SEQ ID NO: 1236 - DNA, 21 bp, Sorghum bicolor
tagccaaggatgacttgccta

SEQ ID NO: 1237 - DNA, 21 bp, Sorghum bicolor
tagccaaggatgacttgccta

SEQ ID NO: 1238 - DNA, 22 bp, Brachypodium distachyon
ccagccaagaatggcttgccta

SEQ ID NO: 1239 - DNA, 21 bp, Populus trichocarpa
tagccaaggatgacttgctcg

SEQ ID NO: 1240 - DNA, 22 bp, Brachypodium distachyon
tagccaaggatgatttgcctgt

SEQ ID NO: 1241 - DNA, 21 bp, Populus trichocarpa
tagccaaggacgacttgcctg

SEQ ID NO: 1242 - DNA, 21 bp, Glycine max
cagccaaggatgacttgccga

SEQ ID NO: 1243 - DNA, 21 bp, Zea mays
cagccaaggatgacttgccga

SEQ ID NO: 1244 - DNA, 21 bp, Zea mays
cagccaaggatgacttgccga

SEQ ID NO: 1245 - DNA, 21 bp, Theobroma cacao
cagccaaggatgacttgccga

SEQ ID NO: 1246 - DNA, 21 bp, Theobroma cacao
cagccaaggatgacttgccga

SEQ ID NO: 1247 - DNA, 21 bp, Theobroma cacao
cagccaaggatgacttgccga

SEQ ID NO: 1248 - DNA, 21 bp, Sorghum bicolor
tagccaaggatgacttgccta

SEQ ID NO: 1249 - DNA, 21 bp, Brassica napus
tagccaaggatgacttgccta

SEQ ID NO: 1250 - DNA, 21 bp, Arabidopsis thaliana
cagccaaggatgacttgccga

SEQ ID NO: 1251 - DNA, 21 bp, Brassica napus
cagccaaggatgacttgccga

SEQ ID NO: 1252 - DNA, 21 bp, Vitis vinifera
tagccaaggatgacttgccta

SEQ ID NO: 1253 - DNA, 21 bp, Solanum lycopersicum
cagccaaggatgacttgccga

SEQ ID NO: 1254 - DNA, 21 bp, Brassica napus
tagccaaggatgacttgccta

SEQ ID NO: 1255 - DNA, 21 bp, Sorghum bicolor
tagccaaggatgacttgccta

SEQ ID NO: 1256 - DNA, 21 bp, Festuca arundinacea
tagccaaggatgacttgccta

SEQ ID NO: 1257 - DNA, 21 bp, Brachypodium distachyon
cagccaaggatgacttgccga

SEQ ID NO: 1258 - DNA, 21 bp, Oryza sativa
tagccaaggatgacttgccta

SEQ ID NO: 1259 - DNA, 21 bp, Aquilegia caerulea
tagccaaggatgacttgccta

SEQ ID NO: 1260 - DNA, 21 bp, Vitis vinifera
cagccaaggatgacttgccga

SEQ ID NO: 1261 - DNA, 21 bp, Aegilops tauschii
tagccaaggatgaattgccag

SEQ ID NO: 1262 - DNA, 21 bp, Populus trichocarpa
tagccaaggatgacttgccta

SEQ ID NO: 1263 - DNA, 22 bp, Oryza sativa
tagccaaggacaaacttgccgg

SEQ ID NO: 1264 - DNA, 21 bp, Arabidopsis lyrata
tagccaaagatgacttgcctg

SEQ ID NO: 1265 - DNA, 21 bp, Brassica napus
tagccaaggatgacttgccta

SEQ ID NO: 1266 - DNA, 21 bp, Solanum lycopersicum
tagccaaggatgacttgccta

SEQ ID NO: 1267 - DNA, 21 bp, Vitis vinifera
cagccaaggatgacttgccga

SEQ ID NO: 1268 - DNA, 21 bp, Brachypodium distachyon
tagccaaggatgacttgccta

SEQ ID NO: 1269 - DNA, 21 bp, Oryza sativa
tagccaaggatgacttgccta

SEQ ID NO: 1270 - DNA, 21 bp, Populus trichocarpa
tagccaaggatgacttgccca

SEQ ID NO: 1271 - DNA, 21 bp, Populus trichocarpa
tagccaaggatgacttgccca

SEQ ID NO: 1272 - DNA, 21 bp, Oryza sativa
cagccaaggatgacttgccga

SEQ ID NO: 1273 - DNA, 21 bp, Zea mays
cagccaaggatgacttgccga

SEQ ID NO: 1274 - DNA, 21 bp, Zea mays
cagccaaggatgacttgccga

SEQ ID NO: 1275 - DNA, 21 bp, Sorghum bicolor
cagccaaggatgacttgccga

SEQ ID NO: 1276 - DNA, 21 bp, Populus tremula
cagccaaggatgacttgccga

SEQ ID NO: 1277 - DNA, 21 bp, Zea mays
cagccaaggatgacttgccga

SEQ ID NO: 1278 - DNA, 21 bp, Zea mays
tagccaaggatgacttgccta

SEQ ID NO: 1279 - DNA, 21 bp, Zea mays
tagccaaggatgacttgccta

SEQ ID NO: 1280 - DNA, 21 bp, Sorghum bicolor
tagccaaggatgatttgcctg

SEQ ID NO: 1281 - DNA, 21 bp, Theobroma cacao
tagccaaggatgacttgccta

SEQ ID NO: 1282 - DNA, 21 bp, Brassica napus
tagccaaggatgacttgccta

SEQ ID NO: 1283 - DNA, 20 bp, Prunus salicina
agccaaaaatgacttgctgc

SEQ ID NO: 1284 - DNA, 21 bp, Zea mays
tagccaaggatgacttgccta

SEQ ID NO: 1285 - DNA, 21 bp, Populus trichocarpa
cagccaaggatgacttgccga

SEQ ID NO: 1286 - DNA, 21 bp, Populus trichocarpa
cagccaaggatgacttgccga

SEQ ID NO: 1287 - DNA, 21 bp, Populus trichocarpa
cagccaaggatgacttgccga

SEQ ID NO: 1288 - DNA, 21 bp, Theobroma cacao
tagccaaggatgagttgcctg

SEQ ID NO: 1289 - DNA, 21 bp, Medicago truncatula
cagccaaggatgacttgccga

SEQ ID NO: 1290 - DNA, 21 bp, Medicago truncatula
cagccaaggatgacttgccga

SEQ ID NO: 1291 - DNA, 21 bp, Arabidopsis lyrata
cagccaaggatgacttgccga

SEQ ID NO: 1292 - DNA, 21 bp, Populus trichocarpa
tagccaaggacgacttgccca

SEQ ID NO: 1293 - DNA, 21 bp, Populus trichocarpa
cagccaagaatgatttgccgg

SEQ ID NO: 1294 - DNA, 21 bp, Populus trichocarpa
tagccaaggacgacttgccca

SEQ ID NO: 1295 - DNA, 21 bp, Sorghum bicolor
tagccaagaatgacttgccta

SEQ ID NO: 1296 - DNA, 21 bp, Theobroma cacao
tagccagggatgacttgccta

SEQ ID NO: 1297 - DNA, 21 bp, Vitis vinifera
cagccaagaatgatttgccgg

SEQ ID NO: 1298 - DNA, 21 bp, Populus trichocarpa
tagccaaggacgacttgccta

SEQ ID NO: 1299 - DNA, 21 bp, Gossypium hirsutum
acgccaaggatgtcttgcgtc

SEQ ID NO: 1300 - DNA, 21 bp, Medicago truncatula
cagccaagggtgatttgccgg

SEQ ID NO: 1301 - DNA, 21 bp, Populus trichocarpa
tagccaaggacgacttgccca

SEQ ID NO: 1302 - DNA, 21 bp, Populus trichocarpa
tagccaaggacgacttgccca

SEQ ID NO: 1303 - DNA, 21 bp, Oryza sativa
tagccaagaatgacttgccta

SEQ ID NO: 1304 - DNA, 21 bp, Oryza sativa
tagccaagaatgacttgccta

SEQ ID NO: 1305 - DNA, 21 bp, Vitis vinifera
tagcgaaggatgacttgccta

SEQ ID NO: 1306 - DNA, 21 bp, Populus trichocarpa
tagccaaggacgacttgccca

SEQ ID NO: 1307 - DNA, 21 bp, Populus tremula
cagccaaggatgatttgccga

SEQ ID NO: 1308 - DNA, 21 bp, Brachypodium distachyon
tagccaagaatgacttgccta

SEQ ID NO: 1309 - DNA, 21 bp, Sorghum bicolor
tagccaagaatggcttgccta

SEQ ID NO: 1310 - DNA, 21 bp, Sorghum bicolor
tagccaagaatggcttgccta

SEQ ID NO: 1311 - DNA, 21 bp, Arabidopsis thaliana
tccggcaagttgaccttggct

SEQ ID NO: 1312 - DNA, 21 bp, Medicago truncatula
aagccaaggatgacttgccgg

SEQ ID NO: 1313 - DNA, 21 bp, Sorghum bicolor
tagccaaggatgacttgccgg

SEQ ID NO: 1314 - DNA, 21 bp, Sorghum bicolor
tagccaaggatgacttgcctg

SEQ ID NO: 1315 - DNA, 21 bp, Sorghum bicolor
tagccaaggatgacttgccta

SEQ ID NO: 1316 - DNA, 21 bp, Zea mays
tagccaagaatgacttgccta

SEQ ID NO: 1317 - DNA, 21 bp, Zea mays
tagccagggatgatttgcctg

SEQ ID NO: 1318 - DNA, 21 bp, Medicago truncatula
cagccaagggtgatttgccgg

SEQ ID NO: 1319 - DNA, 21 bp, Zea mays
tagccaagaatggcttgccta

SEQ ID NO: 1320 - DNA, 21 bp, Zea mays
tagccaagaatggcttgccta

SEQ ID NO: 1321 - DNA, 21 bp, Zea mays
tagccaagaatggcttgccta

SEQ ID NO: 1322 - DNA, 21 bp, Sorghum bicolor
tgccaaaggggatttgcccgg

SEQ ID NO: 1323 - DNA, 21 bp, Arabidopsis lyrata
tgccaaaggagatttgcccgg

SEQ ID NO: 1324 - DNA, 21 bp, Arabidopsis lyrata
tgccaaaggagatttgcccgg

SEQ ID NO: 1325 - DNA, 21 bp, Arabidopsis lyrata
tgccaaaggagatttgcccgg

SEQ ID NO: 1326 - DNA, 21 bp, Arabidopsis thaliana
tgccaaaggagatttgcccgg

SEQ ID NO: 1327 - DNA, 21 bp, Brassica napus
tgccaaaggagatttgcccgg

SEQ ID NO: 1328 - DNA, 21 bp, Citrus sinensis
tgccaaaggagatttgcccgg

SEQ ID NO: 1329 - DNA, 21 bp, Populus trichocarpa
tgccaaaggagatttgcccgg

SEQ ID NO: 1330 - DNA, 21 bp, Populus trichocarpa
tgccaaaggagatttgcccgg

SEQ ID NO: 1331 - DNA, 21 bp, Ricinus communis
tgccaaaggagatttgcccgg

SEQ ID NO: 1332 - DNA, 21 bp, Ricinus communis
tgccaaaggagatttgcccgg

SEQ ID NO: 1333 - DNA, 21 bp, Theobroma cacao
tgccaaaggagatttgcccgg

SEQ ID NO: 1334 - DNA, 21 bp, Theobroma cacao
tgccaaaggagatttgcccgg

SEQ ID NO: 1335 - DNA, 21 bp, Vitis vinifera
tgccaaaggagatttgcccgg

SEQ ID NO: 1336 - DNA, 21 bp, Arabidopsis lyrata
tgccaaaggagatttgccccg

SEQ ID NO: 1337 - DNA, 21 bp, Arabidopsis lyrata
tgccaaaggagatttgccctg

SEQ ID NO: 1338 - DNA, 21 bp, Arabidopsis lyrata
tgccaaaggagatttgccccg

SEQ ID NO: 1339 - DNA, 21 bp, Arabidopsis lyrata
tgccaaaggagatttgccccg

SEQ ID NO: 1340 - DNA, 21 bp, Arabidopsis thaliana
tgccaaaggagatttgccctg

SEQ ID NO: 1341 - DNA, 21 bp, Arabidopsis thaliana
tgccaaaggagatttgccccg

SEQ ID NO: 1342 - DNA, 21 bp, Gossypium hirsutum
tgccaaaggagatttgccctg

SEQ ID NO: 1343 - DNA, 21 bp, Hordeum vulgare
tgccaaaggagatttgccccg

SEQ ID NO: 1344 - DNA, 21 bp, Medicago truncatula
tgccaaaggagatttgcccag

SEQ ID NO: 1345 - DNA, 21 bp, Medicago truncatula
tgccaaaggagatttgccctg

SEQ ID NO: 1346 - DNA, 21 bp, Medicago truncatula
tgccaaaggagatttgcccag

SEQ ID NO: 1347 - DNA, 21 bp, Medicago truncatula
tgccaaaggagatttgcccag

SEQ ID NO: 1348 - DNA, 21 bp, Medicago truncatula
tgccaaaggagatttgcccag

SEQ ID NO: 1349 - DNA, 21 bp, Medicago truncatula
tgccaaaggagatttgccctg

SEQ ID NO: 1350 - DNA, 21 bp, Medicago truncatula
tgccaaaggagatttgccctg

SEQ ID NO: 1351 - DNA, 21 bp, Oryza sativa
tgccaaaggagatttgcccag

SEQ ID NO: 1352 - DNA, 21 bp, Oryza sativa
tgccaaaggagatttgcccag

SEQ ID NO: 1353 - DNA, 21 bp, Oryza sativa
tgccaaaggagatttgcccag

SEQ ID NO: 1354 - DNA, 21 bp, Populus trichocarpa
tgccaaaggagatttgccccg

SEQ ID NO: 1355 - DNA, 21 bp, Populus trichocarpa
tgccaaaggagatttgtccgg

SEQ ID NO: 1356 - DNA, 21 bp, Ricinus communis
tgccaaaggagatttgcccag

SEQ ID NO: 1357 - DNA, 21 bp, Sorghum bicolor
tgccaaaggagatttgcccag

SEQ ID NO: 1358 - DNA, 21 bp, Sorghum bicolor
tgccaaaggagatttgcccag

SEQ ID NO: 1359 - DNA, 21 bp, Theobroma cacao
tgccaaaggagatttgccccg

SEQ ID NO: 1360 - DNA, 21 bp, Arabidopsis lyrata
tgccaaaggagagttgccctg

SEQ ID NO: 1361 - DNA, 21 bp, Arabidopsis lyrata
tgccaaaggagagttgccctg

SEQ ID NO: 1362 - DNA, 21 bp, Arabidopsis lyrata
tgccaaaggagatttgcctcg

SEQ ID NO: 1363 - DNA, 21 bp, Arabidopsis thaliana
tgccaaaggagagttgccctg

SEQ ID NO: 1364 - DNA, 21 bp, Arabidopsis thaliana
tgccaaaggagagttgccctg

SEQ ID NO: 1365 - DNA, 21 bp, Arabidopsis thaliana
tgccaaaggagatttgcctcg

SEQ ID NO: 1366 - DNA, 21 bp, Brachypodium distachyon
tgccaaaggagaattgccctg

SEQ ID NO: 1367 - DNA, 21 bp, Citrus sinensis
tgccaaaggagaattgccctg

SEQ ID NO: 1368 - DNA, 21 bp, Citrus sinensis
tgccaaaggagagttgccctg

SEQ ID NO: 1369 - DNA, 21 bp, Citrus sinensis
tgccaaaggagaattgccctg

SEQ ID NO: 1370 - DNA, 21 bp, Medicago truncatula
tgccaaagaagatttgccctg

SEQ ID NO: 1371 - DNA, 21 bp, Medicago truncatula
tgccaaaggagagttgccctg

SEQ ID NO: 1372 - DNA, 21 bp, Medicago truncatula
tgccaaaggagagttgccctg

SEQ ID NO: 1373 - DNA, 21 bp, Oryza sativa
tgccaaaggagaattgccctg

SEQ ID NO: 1374 - DNA, 21 bp, Oryza sativa
tgccaaaggagaattgccctg

SEQ ID NO: 1375 - DNA, 21 bp, Oryza sativa
tgccaaaggagaattgccctg

SEQ ID NO: 1376 - DNA, 21 bp, Oryza sativa
tgccaaaggagagttgccctg

SEQ ID NO: 1377 - DNA, 21 bp, Oryza sativa
tgccaaaggagacttgcccag

SEQ ID NO: 1378 - DNA, 21 bp, Oryza sativa
tgccaaaggaaatttgccccg

SEQ ID NO: 1379 - DNA, 21 bp, Populus trichocarpa
tgccaaagaagatttgccccg

SEQ ID NO: 1380 - DNA, 21 bp, Populus trichocarpa
tgccaaagaagatttgccccg

SEQ ID NO: 1381 - DNA, 21 bp, Populus trichocarpa
tgccaaaggagaattgccctg

SEQ ID NO: 1382 - DNA, 21 bp, Populus trichocarpa
tgccaaaggagaattgccctg

SEQ ID NO: 1383 - DNA, 21 bp, Phaseolus vulgaris
tgccaaaggagagttgccctg

SEQ ID NO: 1384 - DNA, 21 bp, Ricinus communis
tgccaaaggagagttgccctg

SEQ ID NO: 1385 - DNA, 21 bp, Sorghum bicolor
tgccaaaggagaattgccctg

SEQ ID NO: 1386 - DNA, 21 bp, Sorghum bicolor
tgccaaaggagaattgccctg

SEQ ID NO: 1387 - DNA, 21 bp, Sorghum bicolor
tgccaaaggagagttgccctg

SEQ ID NO: 1388 - DNA, 21 bp, Sorghum bicolor
tgccaaaggaaatttgccccg

SEQ ID NO: 1389 - DNA, 21 bp, Sorghum bicolor
tgccaaaggagaattgccctg

SEQ ID NO: 1390 - DNA, 21 bp, Sorghum bicolor
tgccaaaggagagttgccctg

SEQ ID NO: 1391 - DNA, 21 bp, Sorghum bicolor
tgccaaaggagaattgccctg

SEQ ID NO: 1392 - DNA, 21 bp, Theobroma cacao
tgccaatggagatttgcccag

SEQ ID NO: 1393 - DNA, 21 bp, Theobroma cacao
tgccagaggagatttgccctg

SEQ ID NO: 1394 - DNA, 21 bp, Theobroma cacao
tgccaaaggagaattgccctg

SEQ ID NO: 1395 - DNA, 21 bp, Theobroma cacao
tgccaaaggagagttgccctg

SEQ ID NO: 1396 - DNA, 21 bp, Vitis vinifera
tgccaaaggagaattgccctg

SEQ ID NO: 1397 - DNA, 21 bp, Vitis vinifera
tgccaaaggagagttgccctg

SEQ ID NO: 1398 - DNA, 21 bp, Vitis vinifera
tgccaaaggagagttgccctg

SEQ ID NO: 1399 - DNA, 21 bp, Vitis vinifera
tgccaaaggagatttgctcgt

SEQ ID NO: 1400 - DNA, 21 bp, Vitis vinifera
tgccaaaggagatttgcccct

SEQ ID NO: 1401 - DNA, 21 bp, Vitis vinifera
tgccaaaggagaattgccctg

SEQ ID NO: 1402 - DNA, 21 bp, Zea mays
tgccaaaggagaattgccctg

SEQ ID NO: 1403 - DNA, 21 bp, Zea mays
tgccaaaggagaattgccctg

SEQ ID NO: 1404 - DNA, 21 bp, Zea mays
tgccaaaggagagttgccctg

SEQ ID NO: 1405 - DNA, 21 bp, Zea mays
tgccaaaggaaatttgccccg

SEQ ID NO: 1406 - DNA, 21 bp, Zea mays
tgccaaaggagaattgccctg

SEQ ID NO: 1407 - DNA, 21 bp, Zea mays
tgccaaaggagagttgccctg

SEQ ID NO: 1408 - DNA, 21 bp, Zea mays
tgccaaaggagagttgccctg

SEQ ID NO: 1409 - DNA, 21 bp, Aquilegia caerulea
tgccaaaggagagttgcccta

SEQ ID NO: 1410 - DNA, 21 bp, Brachypodium distachyon
tgccaaaggagaattaccctg

SEQ ID NO: 1411 - DNA, 21 bp, Citrus sinensis
tgccaaaggagagttgcccta

SEQ ID NO: 1412 - DNA, 21 bp, Gossypium hirsutum
cgccaatggagatttgtccgg

SEQ ID NO: 1413 - DNA, 21 bp, Gossypium hirsutum
cgccaatggagatttgtccgg

SEQ ID NO: 1414 - DNA, 21 bp, Medicago truncatula
tgccaaaggagagctgccctg

SEQ ID NO: 1415 - DNA, 21 bp, Medicago truncatula
cgccaaagaagatttgccccg

SEQ ID NO: 1416 - DNA, 21 bp, Medicago truncatula
tgccaaaggagagctgccctg

SEQ ID NO: 1417 - DNA, 21 bp, Oryza sativa
tgccaaaggagagctgccctg

SEQ ID NO: 1418 - DNA, 21 bp, Oryza sativa
tgccaaaggagagttgcccta

SEQ ID NO: 1419 - DNA, 21 bp, Populus trichocarpa
tgccaaaggagagtttccctg

SEQ ID NO: 1420 - DNA, 21 bp, Populus trichocarpa
tgccaaaggagagttgcccta

SEQ ID NO: 1421 - DNA, 21 bp, Populus trichocarpa
tgccaaaggagatttgctcac

SEQ ID NO: 1422 - DNA, 21 bp, Ricinus communis
tgccaaaggagagctgccctg

SEQ ID NO: 1423 - DNA, 21 bp, Ricinus communis
tgccaaaggagatttgctcac

SEQ ID NO: 1424 - DNA, 21 bp, Sorghum bicolor
tgccaaaggagagctgccctg

SEQ ID NO: 1425 - DNA, 21 bp, Solanum lycopersicum
tgccaaaggagagttgcccta

SEQ ID NO: 1426 - DNA, 19 bp, Triticum aestivum
tgccaaaggagaattgccc

SEQ ID NO: 1427 - DNA, 21 bp, Theobroma cacao
cgccaaaggagagttgccctg

SEQ ID NO: 1428 - DNA, 21 bp, Theobroma cacao
cgccaaaggagaattgccctg

SEQ ID NO: 1429 - DNA, 21 bp, Vitis vinifera
tgccgaaggagatttgtcctg

SEQ ID NO: 1430 - DNA, 21 bp, Vitis vinifera
cgccaaaggagagttgccctg

SEQ ID NO: 1431 - DNA, 21 bp, Zea mays
tgccaaaggagagctgccctg

SEQ ID NO: 1432 - DNA, 21 bp, Gossypium hirsutum
tgccaaaggagagttggcctt

SEQ ID NO: 1433 - DNA, 21 bp, Medicago truncatula
tgccaaaggagagctgcccta

SEQ ID NO: 1434 - DNA, 21 bp, Medicago truncatula
tgccaaaggagagctgcccta

SEQ ID NO: 1435 - DNA, 21 bp, Medicago truncatula
tgccaaaggagagctgcccta

SEQ ID NO: 1436 - DNA, 21 bp, Populus trichocarpa
cgccaaaggagagttgccctc

SEQ ID NO: 1437 - DNA, 21 bp, Zea mays
tgccaaaggagagctgtcctg

SEQ ID NO: 1438 - DNA, 21 bp, Medicago truncatula
tgccaaaggagagctgctctt

SEQ ID NO: 1439 - DNA, 21 bp, Brachypodium distachyon
tggaaggggcatgcagaggag

SEQ ID NO: 1440 - DNA, 21 bp, Oryza sativa
tggaaggggcatgcagaggag

SEQ ID NO: 1441 - DNA, 21 bp, Sorghum bicolor
tggaaggggcatgcagaggag

SEQ ID NO: 1442 - DNA, 21 bp, Saccharum ssp.
tggaaggggcatgcagaggag

SEQ ID NO: 1443 - DNA, 21 bp, Zea mays
tggaaggggcatgcagaggag

SEQ ID NO: 1444 - DNA, 21 bp, Zea mays
tggaaggggcatgcagaggag

SEQ ID NO: 1445 - DNA, 21 bp, Physcomitrella patens
agaagagagagagcacagccc

SEQ ID NO: 1446 - DNA, 21 bp, Physcomitrella patens
cgaagagagagagcacagccc

SEQ ID NO: 1447 - DNA, 21 bp, Physcomitrella patens
cgaagagagagagcacagccc

SEQ ID NO: 1448 - DNA, 21 bp, Physcomitrella patens
cgaagagagagagcacagccc

SEQ ID NO: 1449 - DNA, 21 bp, Physcomitrella patens
agaagagagagagtacagccc

SEQ ID NO: 1450 - DNA, 21 bp, Physcomitrella patens
agaagagagagagtacagccc

SEQ ID NO: 1451 - DNA, 21 bp, Brachypodium distachyon
agaagagagagagtacagcct

SEQ ID NO: 1452 - DNA, 21 bp, Festuca arundinacea
agaagagagagagcacagctt

SEQ ID NO: 1453 - DNA, 21 bp, Physcomitrella patens
cgaagagagagagcacagtcc

SEQ ID NO: 1454 - DNA, 21 bp, Zea mays
agaagagagagagtacagcct

SEQ ID NO: 1455 - DNA, 21 bp, Oryza sativa
agaagagagagagtacagctt

SEQ ID NO: 1456 - DNA, 21 bp, Zea mays
gtgaagtgtttgggggaactc

SEQ ID NO: 1457 - DNA, 21 bp, Zea mays
gtgaagtgtttgggggaactc

SEQ ID NO: 1458 - DNA, 21 bp, Zea mays
gtgaagtgtttgggggaactc

SEQ ID NO: 1459 - DNA, 21 bp, Oryza sativa
gtgaagtgtttgggggaactc

SEQ ID NO: 1460 - DNA, 21 bp, Oryza sativa
gtgaagtgtttgggggaactc

SEQ ID NO: 1461 - DNA, 21 bp, Oryza sativa
gtgaagtgtttgggggaactc

SEQ ID NO: 1462 - DNA, 21 bp, Oryza sativa
gtgaagtgtttgggggaactc

SEQ ID NO: 1463 - DNA, 21 bp, Oryza sativa
gtgaagtgtttgggggaactc

SEQ ID NO: 1464 - DNA, 21 bp, Oryza sativa
gtgaagtgtttgggggaactc

SEQ ID NO: 1465 - DNA, 21 bp, Oryza sativa
gtgaagtgtttgggggaactc

SEQ ID NO: 1466 - DNA, 21 bp, Oryza sativa
gtgaagtgtttgggggaactc

SEQ ID NO: 1467 - DNA, 21 bp, Oryza sativa
gtgaagtgtttgggggaactc

SEQ ID NO: 1468 - DNA, 21 bp, Oryza sativa
gtgaagtgtttgggggaactc

SEQ ID NO: 1469 - DNA, 21 bp, Oryza sativa
gtgaagtgtttgggggaactc

SEQ ID NO: 1470 - DNA, 21 bp, Oryza sativa
gtgaagtgtttgggggaactc

SEQ ID NO: 1471 - DNA, 21 bp, Oryza sativa
gtgaagtgtttgggggaactc

SEQ ID NO: 1472 - DNA, 21 bp, Oryza sativa
gtgaagtgtttgggggaactc

SEQ ID NO: 1473 - DNA, 21 bp, Oryza sativa
gtgaagtgtttgggggaactc

SEQ ID NO: 1474 - DNA, 21 bp, Sorghum bicolor
gtgaagtgtttgggggaactc

SEQ ID NO: 1475 - DNA, 21 bp, Sorghum bicolor
gtgaagtgtttgggggaactc

SEQ ID NO: 1476 - DNA, 21 bp, Sorghum bicolor
gtgaagtgtttgggggaactc

SEQ ID NO: 1477 - DNA, 21 bp, Sorghum bicolor
gtgaagtgtttgggggaactc

SEQ ID NO: 1478 - DNA, 21 bp, Sorghum bicolor
gtgaagtgtttgggggaactc

SEQ ID NO: 1479 - DNA, 21 bp, Sorghum bicolor
gtgaagtgtttgggggaactc

SEQ ID NO: 1480 - DNA, 21 bp, Sorghum bicolor
gtgaagtgtttgggggaactc

SEQ ID NO: 1481 - DNA, 21 bp, Sorghum bicolor
gtgaagtgtttgggggaactc

SEQ ID NO: 1482 - DNA, 21 bp, Sorghum bicolor
gtgaagtgtttgggggaactc

SEQ ID NO: 1483 - DNA, 21 bp, Triticum aestivum
gtgaagtgtttgggggaactc

SEQ ID NO: 1484 - DNA, 21 bp, Zea mays
gtgaagtgtttgggggaactc

SEQ ID NO: 1485 - DNA, 21 bp, Zea mays
gtgaagtgtttgggggaactc

SEQ ID NO: 1486 - DNA, 21 bp, Zea mays
gtgaagtgtttgggggaactc

SEQ ID NO: 1487 - DNA, 21 bp, Zea mays
gtgaagtgtttgggggaactc

SEQ ID NO: 1488 - DNA, 21 bp, Zea mays
gtgaagtgtttgggggaactc

SEQ ID NO: 1489 - DNA, 21 bp, Zea mays
gtgaagtgtttgggggaactc

SEQ ID NO: 1490 - DNA, 21 bp, Zea mays
gtgaagtgtttgggggaactc

SEQ ID NO: 1491 - DNA, 21 bp, Zea mays
gtgaagtgtttgggggaactc

SEQ ID NO: 1492 - DNA, 21 bp, Arabidopsis lyrata
ctgaagtgtttgggggaactc

SEQ ID NO: 1493 - DNA, 21 bp, Arabidopsis lyrata
ctgaagtgtttgggggaactc

SEQ ID NO: 1494 - DNA, 21 bp, Arabidopsis lyrata
ctgaagtgtttgggggaactc

SEQ ID NO: 1495 - DNA, 21 bp, Arabidopsis thaliana
ctgaagtgtttgggggaactc

SEQ ID NO: 1496 - DNA, 21 bp, Arabidopsis thaliana
ctgaagtgtttgggggaactc

SEQ ID NO: 1497 - DNA, 21 bp, Arabidopsis thaliana
ctgaagtgtttgggggaactc

SEQ ID NO: 1498 - DNA, 20 bp, Brachypodium distachyon
tgaagtgtttgggggaactc

SEQ ID NO: 1499 - DNA, 20 bp, Brachypodium distachyon
tgaagtgtttgggggaactc

SEQ ID NO: 1500 - DNA, 20 bp, Brachypodium distachyon
tgaagtgtttgggggaactc

SEQ ID NO: 1501 - DNA, 20 bp, Brachypodium distachyon
tgaagtgtttgggggaactc

SEQ ID NO: 1502 - DNA, 20 bp, Brachypodium distachyon
tgaagtgtttgggggaactc

SEQ ID NO: 1503 - DNA, 20 bp, Brachypodium distachyon
tgaagtgtttgggggaactc

SEQ ID NO: 1504 - DNA, 20 bp, Brachypodium distachyon
tgaagtgtttgggggaactc

SEQ ID NO: 1505 - DNA, 20 bp, Brachypodium distachyon
tgaagtgtttgggggaactc

SEQ ID NO: 1506 - DNA, 20 bp, Brachypodium distachyon
tgaagtgtttgggggaactc

SEQ ID NO: 1507 - DNA, 20 bp, Brachypodium distachyon
tgaagtgtttgggggaactc

SEQ ID NO: 1508 - DNA, 20 bp, Brachypodium distachyon
tgaagtgtttgggggaactc

SEQ ID NO: 1509 - DNA, 20 bp, Brachypodium distachyon
tgaagtgtttgggggaactc

SEQ ID NO: 1510 - DNA, 20 bp, Brachypodium distachyon
tgaagtgtttgggggaactc

SEQ ID NO: 1511 - DNA, 21 bp, Citrus sinensis
ctgaagtgtttgggggaactc

SEQ ID NO: 1512 - DNA, 21 bp, Gossypium hirsutum
ctgaagtgtttgggggaactc

SEQ ID NO: 1513 - DNA, 21 bp, Glycine max
atgaagtgtttgggggaactc

SEQ ID NO: 1514 - DNA, 21 bp, Medicago truncatula
atgaagtgtttgggggaactc

SEQ ID NO: 1515 - DNA, 21 bp, Medicago truncatula
atgaagtgtttgggggaactc

SEQ ID NO: 1516 - DNA, 21 bp, Medicago truncatula
atgaagtgtttgggggaactc

SEQ ID NO: 1517 - DNA, 21 bp, Medicago truncatula
atgaagtgtttgggggaactc

SEQ ID NO: 1518 - DNA, 21 bp, Medicago truncatula
atgaagtgtttgggggaactc

SEQ ID NO: 1519 - DNA, 21 bp, Medicago truncatula
ttgaagtgtttgggggaactc

SEQ ID NO: 1520 - DNA, 21 bp, Medicago truncatula
atgaagtgtttgggggaactc

SEQ ID NO: 1521 - DNA, 21 bp, Medicago truncatula
atgaagtgtttgggggaactc

SEQ ID NO: 1522 - DNA, 21 bp, Medicago truncatula
atgaagtgtttgggggaactc

SEQ ID NO: 1523 - DNA, 21 bp, Medicago truncatula
atgaagtgtttgggggaactc

SEQ ID NO: 1524 - DNA, 21 bp, Medicago truncatula
atgaagtgtttgggggaactc

SEQ ID NO: 1525 - DNA, 21 bp, Medicago truncatula
atgaagtgtttgggggaactc

SEQ ID NO: 1526 - DNA, 21 bp, Medicago truncatula
atgaagtgtttgggggaactc

SEQ ID NO: 1527 - DNA, 21 bp, Medicago truncatula
atgaagtgtttgggggaactc

SEQ ID NO: 1528 - DNA, 21 bp, Medicago truncatula
atgaagtgtttgggggaactc

SEQ ID NO: 1529 - DNA, 21 bp, Oryza sativa
gtgaagtgcttgggggaactc

SEQ ID NO: 1530 - DNA, 21 bp, Oryza sativa
gtgaagtgtttggaggaactc

SEQ ID NO: 1531 - DNA, 21 bp, Oryza sativa
gtgaattgtttgggggaactc

SEQ ID NO: 1532 - DNA, 21 bp, Oryza sativa
gtgaagtgtttggggaaactc

SEQ ID NO: 1533 - DNA, 21 bp, Populus trichocarpa
ctgaagtgtttgggggaactc

SEQ ID NO: 1534 - DNA, 21 bp, Populus trichocarpa
ctgaagtgtttgggggaactc

SEQ ID NO: 1535 - DNA, 21 bp, Populus trichocarpa
ctgaagtgtttgggggaactc

SEQ ID NO: 1536 - DNA, 21 bp, Populus trichocarpa
ctgaagtgtttgggggaactc

SEQ ID NO: 1537 - DNA, 21 bp, Populus trichocarpa
ctgaagtgtttgggggaactc

SEQ ID NO: 1538 - DNA, 21 bp, Populus trichocarpa
ctgaagtgtttgggggaactc

SEQ ID NO: 1539 - DNA, 21 bp, Populus trichocarpa
ctgaagtgtttgggggaactc

SEQ ID NO: 1540 - DNA, 21 bp, Populus trichocarpa
ctgaagtgtttgggggaactc

SEQ ID NO: 1541 - DNA, 21 bp, Populus trichocarpa
ctgaagtgtttgggggaactc

SEQ ID NO: 1542 - DNA, 21 bp, Ricinus communis
ctgaagtgtttgggggaactc

SEQ ID NO: 1543 - DNA, 21 bp, Ricinus communis
ctgaagtgtttgggggaactc

SEQ ID NO: 1544 - DNA, 21 bp, Ricinus communis
ctgaagtgtttgggggaactc

SEQ ID NO: 1545 - DNA, 21 bp, Ricinus communis
ctgaagtgtttgggggaactc

SEQ ID NO: 1546 - DNA, 21 bp, Ricinus communis
ctgaagtgtttgggggaactc

SEQ ID NO: 1547 - DNA, 21 bp, Sorghum bicolor
atgaagtgtttgggggaactc

SEQ ID NO: 1548 - DNA, 21 bp, Sorghum bicolor
gtgaagtgtttggaggaactc

SEQ ID NO: 1549 - DNA, 21 bp, Sorghum bicolor
gtgaagtgcttgggggaactc

SEQ ID NO: 1550 - DNA, 21 bp, Solanum demissum
ctgaagtgtttgggggaactc

SEQ ID NO: 1551 - DNA, 22 bp, Solanum lycopersicum
ctgaagtgtttgggggaactcc

SEQ ID NO: 1552 - DNA, 22 bp, Solanum lycopersicum
ctgaagtgtttgggggaactcc

SEQ ID NO: 1553 - DNA, 20 bp, Triticum aestivum
tgaagtgtttgggggaactc

SEQ ID NO: 1554 - DNA, 21 bp, Theobroma cacao
ctgaagtgtttgggggaactc

SEQ ID NO: 1555 - DNA, 21 bp, Theobroma cacao
ctgaagtgtttgggggaactc

SEQ ID NO: 1556 - DNA, 21 bp, Vitis vinifera
ctgaagtgtttgggggaactc

SEQ ID NO: 1557 - DNA, 21 bp, Vitis vinifera
ctgaagtgtttgggggaactc

SEQ ID NO: 1558 - DNA, 21 bp, Vitis vinifera
ctgaagtgtttgggggaactc

SEQ ID NO: 1559 - DNA, 21 bp, Vitis vinifera
ctgaagtgtttgggggaactc

SEQ ID NO: 1560 - DNA, 21 bp, Vitis vinifera
ctgaagtgtttgggggaactc

SEQ ID NO: 1561 - DNA, 21 bp, Vitis vinifera
ctgaagtgtttgggggaactc

SEQ ID NO: 1562 - DNA, 21 bp, Vitis vinifera
ctgaagtgtttgggggaactc

SEQ ID NO: 1563 - DNA, 21 bp, Vitis vinifera
ctgaagtgtttgggggaactc

SEQ ID NO: 1564 - DNA, 21 bp, Vitis vinifera
ctgaagtgtttgggggaactc

SEQ ID NO: 1565 - DNA, 21 bp, Vitis vinifera
ctgaagtgtttgggggaactc

SEQ ID NO: 1566 - DNA, 21 bp, Vitis vinifera
ctgaagtgtttgggggaactc

SEQ ID NO: 1567 - DNA, 21 bp, Vitis vinifera
ctgaagtgtttgggggaactc

SEQ ID NO: 1568 - DNA, 21 bp, Vitis vinifera
ctgaagtgtttgggggaactc

SEQ ID NO: 1569 - DNA, 21 bp, Zea mays
gtgaagtgtttggaggaactc

SEQ ID NO: 1570 - DNA, 21 bp, Zea mays
gtgaagtgtttggaggaactc

SEQ ID NO: 1571 - DNA, 21 bp, Zea mays
gtgaagtgtttggaggaactc

SEQ ID NO: 1572 - DNA, 21 bp, Zea mays
gtgaagtgtttgggtgaactc

SEQ ID NO: 1573 - DNA, 21 bp, Arabidopsis lyrata
ctgaagtgtttggggggactc

SEQ ID NO: 1574 - DNA, 21 bp, Arabidopsis lyrata
ctgaagtgtttggggggactc

SEQ ID NO: 1575 - DNA, 21 bp, Arabidopsis lyrata
ctgaagtgtttggggggactc

SEQ ID NO: 1576 - DNA, 21 bp, Arabidopsis lyrata
ctgaagtgtttggaggaactc

SEQ ID NO: 1577 - DNA, 21 bp, Arabidopsis thaliana
ctgaagtgtttggggggactc

SEQ ID NO: 1578 - DNA, 21 bp, Arabidopsis thaliana
ctgaagtgtttggggggactc

SEQ ID NO: 1579 - DNA, 21 bp, Arabidopsis thaliana
ctgaagtgtttggggggactc

SEQ ID NO: 1580 - DNA, 21 bp, Gossypium hirsutum
ttgaagtgtttgggggaactt

SEQ ID NO: 1581 - DNA, 21 bp, Medicago truncatula
atgaagtatttgggggaactc

SEQ ID NO: 1582 - DNA, 21 bp, Medicago truncatula
atgaagtgtttgggggaactt

SEQ ID NO: 1583 - DNA, 21 bp, Medicago truncatula
ttgaagcgtttgggggaactc

SEQ ID NO: 1584 - DNA, 20 bp, Oryza sativa
tgaagtgcttgggggaactc

SEQ ID NO: 1585 - DNA, 21 bp, Oryza sativa
atgaagtgtttggaggaactc

SEQ ID NO: 1586 - DNA, 21 bp, Oryza sativa
gtgaagcgtttgggggaaatc

SEQ ID NO: 1587 - DNA, 21 bp, Oryza sativa
gtgaagtatttggcggaactc

SEQ ID NO: 1588 - DNA, 21 bp, Zea mays
gtgaagtgtttgaggaaactc

SEQ ID NO: 1589 - DNA, 21 bp, Arabidopsis lyrata
ctgaagtgtttggggggactt

SEQ ID NO: 1590 - DNA, 21 bp, Aquilegia caerulea
ctgaagggtttggaggaactc

SEQ ID NO: 1591 - DNA, 21 bp, Aquilegia caerulea
ctgaagggtttggaggaactc

SEQ ID NO: 1592 - DNA, 21 bp, Gossypium hirsutum
ctaaagtgtttaggggaactc

SEQ ID NO: 1593 - DNA, 21 bp, Oryza sativa
gtgaagtgtttggagtagctc

SEQ ID NO: 1594 - DNA, 21 bp, Picea abies
ctgaagtgtttggaggaactt

SEQ ID NO: 1595 - DNA, 21 bp, Populus trichocarpa
ctgaagggtttggaggaactc

SEQ ID NO: 1596 - DNA, 21 bp, Brachypodium distachyon
aagtgtttggggaactctagg

SEQ ID NO: 1597 - DNA, 22 bp, Oryza sativa
gtgaagtgtttgggggattctc

SEQ ID NO: 1598 - DNA, 21 bp, Vitis vinifera
ctgaagagtctggaggaactc

SEQ ID NO: 1599 - DNA, 20 bp, Physcomitrella patens
ctgaagcgtttgggggaagg

SEQ ID NO: 1600 - DNA, 21 bp, Zea mays
tgtgttctcaggtcgcccccg

SEQ ID NO: 1601 - DNA, 21 bp, Sorghum bicolor
tgtgttctcaggtcgcccccg

SEQ ID NO: 1602 - DNA, 21 bp, Triticum aestivum
tgtgttctcaggtcgcccccg

SEQ ID NO: 1603 - DNA, 21 bp, Zea mays
tgtgttctcaggtcgcccccg

SEQ ID NO: 1604 - DNA, 21 bp, Zea mays
tgtgttctcaggtcgcccccg

SEQ ID NO: 1605 - DNA, 21 bp, Aquilegia caerulea
tgtgttctcaggtcgcccctg

SEQ ID NO: 1606 - DNA, 21 bp, Brachypodium distachyon
tgtgttctcaggtcgcccctg

SEQ ID NO: 1607 - DNA, 21 bp, Brachypodium distachyon
tgtgttctcaggtcgcccctg

SEQ ID NO: 1608 - DNA, 21 bp, Medicago truncatula
tgtgttctcaggtcgcccctg

SEQ ID NO: 1609 - DNA, 21 bp, Medicago truncatula
tgtgttctcaggtcgcccctg

SEQ ID NO: 1610 - DNA, 21 bp, Oryza sativa
tgtgttctcaggtcgcccctg

SEQ ID NO: 1611 - DNA, 21 bp, Populus trichocarpa
tgtgttctcaggtcgcccctg

SEQ ID NO: 1612 - DNA, 21 bp, Populus trichocarpa
tgtgttctcaggtcgcccctg

SEQ ID NO: 1613 - DNA, 21 bp, Ricinus communis
tgtgttctcaggtcgcccctg

SEQ ID NO: 1614 - DNA, 21 bp, Theobroma cacao
tgtgttctcaggtcgcccctg

SEQ ID NO: 1615 - DNA, 21 bp, Vitis vinifera
tgtgttctcaggtcgcccctg

SEQ ID NO: 1616 - DNA, 21 bp, Vitis vinifera
tgtgttctcaggtcgcccctg

SEQ ID NO: 1617 - DNA, 21 bp, Medicago truncatula
tgtgttctcaggtcacccctt

SEQ ID NO: 1618 - DNA, 21 bp, Arabidopsis lyrata
tgtgttctcaggtcacccctg

SEQ ID NO: 1619 - DNA, 23 bp, Arabidopsis lyrata
tgtgttaactcaggtcacccctg

SEQ ID NO: 1620 - DNA, 21 bp, Arabidopsis thaliana
tgtgttctcaggtcacccctg

SEQ ID NO: 1621 - DNA, 21 bp, Arabidopsis thaliana
tgtgttctcaggtcacccctg

SEQ ID NO: 1622 - DNA, 20 bp, Arachis hypogaea
tgtgttctcaggtcacccct

SEQ ID NO: 1623 - DNA, 21 bp, Arabidopsis lyrata
tgtgttctcaggtcacccctt

SEQ ID NO: 1624 - DNA, 21 bp, Aquilegia caerulea
tgtgttctcaggtcacccctt

SEQ ID NO: 1625 - DNA, 21 bp, Arabidopsis thaliana
tgtgttctcaggtcacccctt

SEQ ID NO: 1626 - DNA, 21 bp, Brassica oleracea
tgtgttctcaggtcacccctt

SEQ ID NO: 1627 - DNA, 21 bp, Citrus sinensis
tgtgttctcaggtcacccctt

SEQ ID NO: 1628 - DNA, 21 bp, Gossypium hirsutum
tgtgttctcaggtcacccctt

SEQ ID NO: 1629 - DNA, 21 bp, Glycine max
tgtgttctcaggtcacccctt

SEQ ID NO: 1630 - DNA, 21 bp, Glycine max
tgtgttctcaggtcacccctt

SEQ ID NO: 1631 - DNA, 21 bp, Gossypium raimondii
tgtgttctcaggtcacccctt

SEQ ID NO: 1632 - DNA, 21 bp, Oryza sativa
tgtgttctcaggtcacccctt

SEQ ID NO: 1633 - DNA, 21 bp, Populus trichocarpa
tgtgttctcaggtcacccctt

SEQ ID NO: 1634 - DNA, 21 bp, Ricinus communis
tgtgttctcaggtcacccctt

SEQ ID NO: 1635 - DNA, 21 bp, Theobroma cacao
tgtgttctcaggtcacccctt

SEQ ID NO: 1636 - DNA, 21 bp, Vitis vinifera
tgtgttctcaggtcacccctt

SEQ ID NO: 1637 - DNA, 21 bp, Pinus taeda
tgtgttccaaggtcaccccag

SEQ ID NO: 1638 - DNA, 21 bp, Zea mays
tcattgagcgcagcgttgatg

SEQ ID NO: 1639 - DNA, 21 bp, Arabidopsis lyrata
tcattgagtgcagcgttgatg

SEQ ID NO: 1640 - DNA, 21 bp, Arabidopsis lyrata
tcattgagtgcagcgttgatg

SEQ ID NO: 1641 - DNA, 21 bp, Arabidopsis thaliana
tcattgagtgcagcgttgatg

SEQ ID NO: 1642 - DNA, 21 bp, Brachypodium distachyon
tcattgagtgcagcgttgatg

SEQ ID NO: 1643 - DNA, 21 bp, Brachypodium distachyon
tcattgagtgcagcgttgatg

SEQ ID NO: 1644 - DNA, 22 bp, Brassica napus
tcattgagtgcagcgttgatgt

SEQ ID NO: 1645 - DNA, 22 bp, Brassica napus
tcattgagtgcagcgttgatgt

SEQ ID NO: 1646 - DNA, 21 bp, Citrus sinensis
tcattgagtgcagcgttgatg

SEQ ID NO: 1647 - DNA, 21 bp, Oryza sativa
tcattgagtgcagcgttgatg

SEQ ID NO: 1648 - DNA, 21 bp, Populus trichocarpa
tcattgagtgcagcgttgatg

SEQ ID NO: 1649 - DNA, 21 bp, Ricinus communis
tcattgagtgcagcgttgatg

SEQ ID NO: 1650 - DNA, 21 bp, Sorghum bicolor
tcattgagtgcagcgttgatg

SEQ ID NO: 1651 - DNA, 21 bp, Theobroma cacao
tcattgagtgcagcgttgatg

SEQ ID NO: 1652 - DNA, 21 bp, Vitis vinifera
tcattgagtgcagcgttgatg

SEQ ID NO: 1653 - DNA, 21 bp, Vitis vinifera
tcattgagtgcagcgttgatg

SEQ ID NO: 1654 - DNA, 21 bp, Arabidopsis thaliana
tcattgagtgcatcgttgatg

SEQ ID NO: 1655 - DNA, 21 bp, Oryza sativa
ttattgagtgcagcgttgatg

SEQ ID NO: 1656 - DNA, 21 bp, Picea abies
tcattgagtgcagcgttgacg

SEQ ID NO: 1657 - DNA, 21 bp, Populus trichocarpa
ccattgagtgcagcgttgatg

SEQ ID NO: 1658 - DNA, 20 bp, Solanum lycopersicum
attgagtgcagcgttgatga

SEQ ID NO: 1659 - DNA, 21 bp, Brachypodium distachyon
attgagtgcagcgttgatgaa

SEQ ID NO: 1660 - DNA, 22 bp, Gossypium hirsutum
ttcattgagtgcagtgttgatt

SEQ ID NO: 1661 - DNA, 21 bp, Hordeum vulgare
ccgttgagtgcagcgttgatg

SEQ ID NO: 1662 - DNA, 21 bp, Populus trichocarpa
tcattgagtggagctttgatg

SEQ ID NO: 1663 - DNA, 21 bp, Oryza sativa
ttgagtgcagcgttgatgaac

SEQ ID NO: 1664 - DNA, 21 bp, Oryza sativa
ttgagtgcagcgttgatgaac

SEQ ID NO: 1665 - DNA, 21 bp, Gossypium hirsutum
ttattgagtgcagccgtgata

SEQ ID NO: 1666 - DNA, 21 bp, Glycine max
atgaagtgtttgggggaactc

SEQ ID NO: 1667 - DNA, 21 bp, Medicago truncatula
atgaagtgtttgggggaactc

SEQ ID NO: 1668 - DNA, 21 bp, Medicago truncatula
atgaagtgtttgggggaactc

SEQ ID NO: 1669 - DNA, 21 bp, Medicago truncatula
atgaagtgtttgggggaactc

SEQ ID NO: 1670 - DNA, 21 bp, Medicago truncatula
atgaagtgtttgggggaactc

SEQ ID NO: 1671 - DNA, 21 bp, Medicago truncatula
atgaagtgtttgggggaactc

SEQ ID NO: 1672 - DNA, 21 bp, Medicago truncatula
atgaagtgtttgggggaactc

SEQ ID NO: 1673 - DNA, 21 bp, Medicago truncatula
atgaagtgtttgggggaactc

SEQ ID NO: 1674 - DNA, 21 bp, Medicago truncatula
atgaagtgtttgggggaactc

SEQ ID NO: 1675 - DNA, 21 bp, Medicago truncatula
atgaagtgtttgggggaactc

SEQ ID NO: 1676 - DNA, 21 bp, Medicago truncatula
atgaagtgtttgggggaactc

SEQ ID NO: 1677 - DNA, 21 bp, Medicago truncatula
atgaagtgtttgggggaactc

SEQ ID NO: 1678 - DNA, 21 bp, Medicago truncatula
atgaagtgtttgggggaactc

SEQ ID NO: 1679 - DNA, 21 bp, Medicago truncatula
atgaagtgtttgggggaactc

SEQ ID NO: 1680 - DNA, 21 bp, Sorghum bicolor
atgaagtgtttgggggaactc

SEQ ID NO: 1681 - DNA, 21 bp, Zea mays
gtgaagtgtttgggggaactc

SEQ ID NO: 1682 - DNA, 21 bp, Zea mays
gtgaagtgtttgggggaactc

SEQ ID NO: 1683 - DNA, 21 bp, Zea mays
gtgaagtgtttgggggaactc

SEQ ID NO: 1684 - DNA, 21 bp, Arabidopsis lyrata
ctgaagtgtttgggggaactc

SEQ ID NO: 1685 - DNA, 21 bp, Arabidopsis lyrata
ctgaagtgtttgggggaactc

SEQ ID NO: 1686 - DNA, 21 bp, Arabidopsis lyrata
ctgaagtgtttgggggaactc

SEQ ID NO: 1687 - DNA, 21 bp, Arabidopsis thaliana
ctgaagtgtttgggggaactc

SEQ ID NO: 1688 - DNA, 21 bp, Arabidopsis thaliana
ctgaagtgtttgggggaactc

SEQ ID NO: 1689 - DNA, 21 bp, Arabidopsis thaliana
ctgaagtgtttgggggaactc

SEQ ID NO: 1690 - DNA, 20 bp, Brachypodium distachyon
tgaagtgtttgggggaactc

SEQ ID NO: 1691 - DNA, 20 bp, Brachypodium distachyon
tgaagtgtttgggggaactc

SEQ ID NO: 1692 - DNA, 20 bp, Brachypodium distachyon
tgaagtgtttgggggaactc

SEQ ID NO: 1693 - DNA, 20 bp, Brachypodium distachyon
tgaagtgtttgggggaactc

SEQ ID NO: 1694 - DNA, 20 bp, Brachypodium distachyon
tgaagtgtttgggggaactc

SEQ ID NO: 1695 - DNA, 20 bp, Brachypodium distachyon
tgaagtgtttgggggaactc

SEQ ID NO: 1696 - DNA, 20 bp, Brachypodium distachyon
tgaagtgtttgggggaactc

SEQ ID NO: 1697 - DNA, 20 bp, Brachypodium distachyon
tgaagtgtttgggggaactc

SEQ ID NO: 1698 - DNA, 20 bp, Brachypodium distachyon
tgaagtgtttgggggaactc

SEQ ID NO: 1699 - DNA, 20 bp, Brachypodium distachyon
tgaagtgtttgggggaactc

SEQ ID NO: 1700 - DNA, 20 bp, Brachypodium distachyon
tgaagtgtttgggggaactc

SEQ ID NO: 1701 - DNA, 20 bp, Brachypodium distachyon
tgaagtgtttgggggaactc

SEQ ID NO: 1702 - DNA, 20 bp, Brachypodium distachyon
tgaagtgtttgggggaactc

SEQ ID NO: 1703 - DNA, 21 bp, Citrus sinensis
ctgaagtgtttgggggaactc

SEQ ID NO: 1704 - DNA, 21 bp, Gossypium hirsutum
ctgaagtgtttgggggaactc

SEQ ID NO: 1705 - DNA, 21 bp, Medicago truncatula
atgaagtatttgggggaactc

SEQ ID NO: 1706 - DNA, 21 bp, Medicago truncatula
ttgaagtgtttgggggaactc

SEQ ID NO: 1707 - DNA, 21 bp, Medicago truncatula
atgaagtgtttgggggaactt

SEQ ID NO: 1708 - DNA, 21 bp, Oryza sativa
gtgaagtgtttgggggaactc

SEQ ID NO: 1709 - DNA, 21 bp, Oryza sativa
gtgaagtgtttgggggaactc

SEQ ID NO: 1710 - DNA, 21 bp, Oryza sativa
gtgaagtgtttgggggaactc

SEQ ID NO: 1711 - DNA, 21 bp, Oryza sativa
gtgaagtgtttgggggaactc

SEQ ID NO: 1712 - DNA, 21 bp, Oryza sativa
gtgaagtgtttgggggaactc

SEQ ID NO: 1713 - DNA, 21 bp, Oryza sativa
gtgaagtgtttgggggaactc

SEQ ID NO: 1714 - DNA, 21 bp, Oryza sativa
gtgaagtgtttgggggaactc

SEQ ID NO: 1715 - DNA, 21 bp, Oryza sativa
gtgaagtgtttgggggaactc

SEQ ID NO: 1716 - DNA, 21 bp, Oryza sativa
gtgaagtgtttgggggaactc

SEQ ID NO: 1717 - DNA, 21 bp, Oryza sativa
gtgaagtgtttgggggaactc

SEQ ID NO: 1718 - DNA, 21 bp, Oryza sativa
gtgaagtgtttgggggaactc

SEQ ID NO: 1719 - DNA, 21 bp, Oryza sativa
atgaagtgtttggaggaactc

SEQ ID NO: 1720 - DNA, 21 bp, Oryza sativa
gtgaagtgtttgggggaactc

SEQ ID NO: 1721 - DNA, 21 bp, Oryza sativa
gtgaagtgtttgggggaactc

SEQ ID NO: 1722 - DNA, 21 bp, Oryza sativa
gtgaagtgtttgggggaactc

SEQ ID NO: 1723 - DNA, 21 bp, Oryza sativa
gtgaagtgtttgggggaactc

SEQ ID NO: 1724 - DNA, 21 bp, Oryza sativa
gtgaagtgtttgggggaactc

SEQ ID NO: 1725 - DNA, 21 bp, Populus trichocarpa
ctgaagtgtttgggggaactc

SEQ ID NO: 1726 - DNA, 21 bp, Populus trichocarpa
ctgaagtgtttgggggaactc

SEQ ID NO: 1727 - DNA, 21 bp, Populus trichocarpa
ctgaagtgtttgggggaactc

SEQ ID NO: 1728 - DNA, 21 bp, Populus trichocarpa
ctgaagtgtttgggggaactc

SEQ ID NO: 1729 - DNA, 21 bp, Populus trichocarpa
ctgaagtgtttgggggaactc

SEQ ID NO: 1730 - DNA, 21 bp, Populus trichocarpa
ctgaagtgtttgggggaactc

SEQ ID NO: 1731 - DNA, 21 bp, Populus trichocarpa
ctgaagtgtttgggggaactc

SEQ ID NO: 1732 - DNA, 21 bp, Populus trichocarpa
ctgaagtgtttgggggaactc

SEQ ID NO: 1733 - DNA, 21 bp, Populus trichocarpa
ctgaagtgtttgggggaactc

SEQ ID NO: 1734 - DNA, 21 bp, Ricinus communis
ctgaagtgtttgggggaactc

SEQ ID NO: 1735 - DNA, 21 bp, Ricinus communis
ctgaagtgtttgggggaactc

SEQ ID NO: 1736 - DNA, 21 bp, Ricinus communis
ctgaagtgtttgggggaactc

SEQ ID NO: 1737 - DNA, 21 bp, Ricinus communis
ctgaagtgtttgggggaactc

SEQ ID NO: 1738 - DNA, 21 bp, Ricinus communis
ctgaagtgtttgggggaactc

SEQ ID NO: 1739 - DNA, 21 bp, Sorghum bicolor
gtgaagtgtttgggggaactc

SEQ ID NO: 1740 - DNA, 21 bp, Sorghum bicolor
gtgaagtgtttgggggaactc

SEQ ID NO: 1741 - DNA, 21 bp, Sorghum bicolor
gtgaagtgtttgggggaactc

SEQ ID NO: 1742 - DNA, 21 bp, Sorghum bicolor
gtgaagtgtttgggggaactc

SEQ ID NO: 1743 - DNA, 21 bp, Sorghum bicolor
gtgaagtgtttgggggaactc

SEQ ID NO: 1744 - DNA, 21 bp, Sorghum bicolor
gtgaagtgtttgggggaactc

SEQ ID NO: 1745 - DNA, 21 bp, Sorghum bicolor
gtgaagtgtttgggggaactc

SEQ ID NO: 1746 - DNA, 21 bp, Sorghum bicolor
gtgaagtgtttgggggaactc

SEQ ID NO: 1747 - DNA, 21 bp, Sorghum bicolor
gtgaagtgtttgggggaactc

SEQ ID NO: 1748 - DNA, 21 bp, Solanum demissum
ctgaagtgtttgggggaactc

SEQ ID NO: 1749 - DNA, 22 bp, Solanum lycopersicum
ctgaagtgtttgggggaactcc

SEQ ID NO: 1750 - DNA, 22 bp, Solanum lycopersicum
ctgaagtgtttgggggaactcc

SEQ ID NO: 1751 - DNA, 21 bp, Triticum aestivum
gtgaagtgtttgggggaactc

SEQ ID NO: 1752 - DNA, 20 bp, Triticum aestivum
tgaagtgtttgggggaactc

SEQ ID NO: 1753 - DNA, 21 bp, Theobroma cacao
ctgaagtgtttgggggaactc

SEQ ID NO: 1754 - DNA, 21 bp, Theobroma cacao
ctgaagtgtttgggggaactc

SEQ ID NO: 1755 - DNA, 21 bp, Vitis vinifera
ctgaagtgtttgggggaactc

SEQ ID NO: 1756 - DNA, 21 bp, Vitis vinifera
ctgaagtgtttgggggaactc

SEQ ID NO: 1757 - DNA, 21 bp, Vitis vinifera
ctgaagtgtttgggggaactc

SEQ ID NO: 1758 - DNA, 21 bp, Vitis vinifera
ctgaagtgtttgggggaactc

SEQ ID NO: 1759 - DNA, 21 bp, Vitis vinifera
ctgaagtgtttgggggaactc

SEQ ID NO: 1760 - DNA, 21 bp, Vitis vinifera
ctgaagtgtttgggggaactc

SEQ ID NO: 1761 - DNA, 21 bp, Vitis vinifera
ctgaagtgtttgggggaactc

SEQ ID NO: 1762 - DNA, 21 bp, Vitis vinifera
ctgaagtgtttgggggaactc

SEQ ID NO: 1763 - DNA, 21 bp, Vitis vinifera
ctgaagtgtttgggggaactc

SEQ ID NO: 1764 - DNA, 21 bp, Vitis vinifera
ctgaagtgtttgggggaactc

SEQ ID NO: 1765 - DNA, 21 bp, Vitis vinifera
ctgaagtgtttgggggaactc

SEQ ID NO: 1766 - DNA, 21 bp, Vitis vinifera
ctgaagtgtttgggggaactc

SEQ ID NO: 1767 - DNA, 21 bp, Vitis vinifera
ctgaagtgtttgggggaactc

SEQ ID NO: 1768 - DNA, 21 bp, Zea mays
gtgaagtgtttgggggaactc

SEQ ID NO: 1769 - DNA, 21 bp, Zea mays
gtgaagtgtttgggggaactc

SEQ ID NO: 1770 - DNA, 21 bp, Zea mays
gtgaagtgtttgggggaactc

SEQ ID NO: 1771 - DNA, 21 bp, Zea mays
gtgaagtgtttgggggaactc

SEQ ID NO: 1772 - DNA, 21 bp, Zea mays
gtgaagtgtttgggggaactc

SEQ ID NO: 1773 - DNA, 21 bp, Zea mays
gtgaagtgtttgggggaactc

SEQ ID NO: 1774 - DNA, 21 bp, Zea mays
gtgaagtgtttgggggaactc

SEQ ID NO: 1775 - DNA, 21 bp, Zea mays
gtgaagtgtttgggggaactc

SEQ ID NO: 1776 - DNA, 21 bp, Arabidopsis lyrata
ctgaagtgtttggggggactc

SEQ ID NO: 1777 - DNA, 21 bp, Arabidopsis lyrata
ctgaagtgtttggggggactc

SEQ ID NO: 1778 - DNA, 21 bp, Arabidopsis lyrata
ctgaagtgtttggggggactc

SEQ ID NO: 1779 - DNA, 21 bp, Arabidopsis lyrata
ctgaagtgtttggaggaactc

SEQ ID NO: 1780 - DNA, 21 bp, Arabidopsis thaliana
ctgaagtgtttggggggactc

SEQ ID NO: 1781 - DNA, 21 bp, Arabidopsis thaliana
ctgaagtgtttggggggactc

SEQ ID NO: 1782 - DNA, 21 bp, Arabidopsis thaliana
ctgaagtgtttggggggactc

SEQ ID NO: 1783 - DNA, 21 bp, Gossypium hirsutum
ttgaagtgtttgggggaactt

SEQ ID NO: 1784 - DNA, 21 bp, Medicago truncatula
ttgaagcgtttgggggaactc

SEQ ID NO: 1785 - DNA, 21 bp, Oryza sativa
gtgaagtgcttgggggaactc

SEQ ID NO: 1786 - DNA, 20 bp, Oryza sativa
tgaagtgcttgggggaactc

SEQ ID NO: 1787 - DNA, 21 bp, Oryza sativa
gtgaagtgtttggaggaactc

SEQ ID NO: 1788 - DNA, 21 bp, Oryza sativa
gtgaattgtttgggggaactc

SEQ ID NO: 1789 - DNA, 21 bp, Oryza sativa
gtgaagtgtttggggaaactc

SEQ ID NO: 1790 - DNA, 21 bp, Sorghum bicolor
gtgaagtgtttggaggaactc

SEQ ID NO: 1791 - DNA, 21 bp, Sorghum bicolor
gtgaagtgcttgggggaactc

SEQ ID NO: 1792 - DNA, 21 bp, Zea mays
gtgaagtgtttggaggaactc

SEQ ID NO: 1793 - DNA, 21 bp, Zea mays
gtgaagtgtttggaggaactc

SEQ ID NO: 1794 - DNA, 21 bp, Zea mays
gtgaagtgtttggaggaactc

SEQ ID NO: 1795 - DNA, 21 bp, Zea mays
gtgaagtgtttgggtgaactc

SEQ ID NO: 1796 - DNA, 21 bp, Arabidopsis lyrata
ctgaagtgtttggggggactt

SEQ ID NO: 1797 - DNA, 21 bp, Aquilegia caerulea
ctgaagggtttggaggaactc

SEQ ID NO: 1798 - DNA, 21 bp, Aquilegia caerulea
ctgaagggtttggaggaactc

SEQ ID NO: 1799 - DNA, 21 bp, Gossypium hirsutum
ctaaagtgtttaggggaactc

SEQ ID NO: 1800 - DNA, 21 bp, Oryza sativa
gtgaagcgtttgggggaaatc

SEQ ID NO: 1801 - DNA, 21 bp, Oryza sativa
gtgaagtatttggcggaactc

SEQ ID NO: 1802 - DNA, 21 bp, Picea abies
ctgaagtgtttggaggaactt

SEQ ID NO: 1803 - DNA, 21 bp, Populus trichocarpa
ctgaagggtttggaggaactc

SEQ ID NO: 1804 - DNA, 21 bp, Zea mays
gtgaagtgtttgaggaaactc

SEQ ID NO: 1805 - DNA, 21 bp, Brachypodium distachyon
aagtgtttggggaactctagg

SEQ ID NO: 1806 - DNA, 21 bp, Oryza sativa
gtgaagtgtttggagtagctc

SEQ ID NO: 1807 - DNA, 21 bp, Vitis vinifera
ctgaagagtctggaggaactc

SEQ ID NO: 1808 - DNA, 22 bp, Oryza sativa
gtgaagtgtttgggggattctc

SEQ ID NO: 1809 - DNA, 20 bp, Physcomitrella patens
ctgaagcgtttgggggaagg

SEQ ID NO: 1810 - DNA, 21 bp, Zea mays
tagccaaggatgacttgccta

SEQ ID NO: 1811 - DNA, 21 bp, Sorghum bicolor
tagccaaggatgacttgcctg

SEQ ID NO: 1812 - DNA, 21 bp, Vitis vinifera
tagccaaggatgacttgcctg

SEQ ID NO: 1813 - DNA, 21 bp, Zea mays
tagccaaggatgacttgccgg

SEQ ID NO: 1814 - DNA, 21 bp, Zea mays
tagccaaggatgacttgccgg

SEQ ID NO: 1815 - DNA, 21 bp, Zea mays
tagccaaggatgacttgccgg

SEQ ID NO: 1816 - DNA, 21 bp, Zea mays
tagccaaggatgacttgccta

SEQ ID NO: 1817 - DNA, 21 bp, Vitis vinifera
tagccaaggatgacttgcctg

SEQ ID NO: 1818 - DNA, 21 bp, Medicago truncatula
aagccaaggatgacttgctgg

SEQ ID NO: 1819 - DNA, 21 bp, Sorghum bicolor
tagccaaggatgacttgcctg

SEQ ID NO: 1820 - DNA, 21 bp, Sorghum bicolor
tagccaaggagactgcctatg

SEQ ID NO: 1821 - DNA, 21 bp, Sorghum bicolor
tagccaaggatgacttgcctg

SEQ ID NO: 1822 - DNA, 21 bp, Zea mays
tagccaaggatgacttgccgg

SEQ ID NO: 1823 - DNA, 21 bp, Zea mays
tagccaaggatgacttgccta

SEQ ID NO: 1824 - DNA, 21 bp, Medicago truncatula
tagccaaggacaacttgccgg

SEQ ID NO: 1825 - DNA, 21 bp, Zea mays
tagccaaggatgacttgccgg

SEQ ID NO: 1826 - DNA, 21 bp, Zea mays
tagccaaggatgacttgccgg

SEQ ID NO: 1827 - DNA, 21 bp, Zea mays
tagccaaggatgacttgccta

SEQ ID NO: 1828 - DNA, 21 bp, Zea mays
gtgaagtgtttggaggaactc

SEQ ID NO: 1829 - DNA, 20 bp, Zea mays
gtgaagtgtttggaggaact

SEQ ID NO: 1830 - DNA, 21 bp, Zea mays
gtgaagtgtttgaggaaactc

SEQ ID NO: 1831 - DNA, 21 bp, Zea mays
tgtgttctcagttcgcccccg

SEQ ID NO: 1832 - DNA, 21 bp, Medicago truncatula
tgtgttctcaggtcgcccctg

SEQ ID NO: 1833 - DNA, 20 bp, Solanum lycopersicum
ttgagtgcagcgttgatgac

SEQ ID NO: 1834 - DNA, 21 bp, Zea mays
gtgaagtgtttggaggaactc

SEQ ID NO: 1835 - DNA, 20 bp, Zea mays
gtgaagtgtttggaggaact

SEQ ID NO: 1836 - DNA, 21 bp, Zea mays
gtgaagtgtttgaggaaactc

SEQ ID NO: 1837 - DNA, 140 bp, Zea mays; identical to SEQ ID NO: 310

SEQ ID NO: 1838 - DNA, 132 bp, Arabidopsis lyrata
ggtagtggatctcgacagggtcgacatgagaacatatgagcaatcaacggctgtaaatgacgctacgtcattattacatctctcggtttcatgtgttaactcaggtcacccctgctgagctctttctctacc

SEQ ID NO: 1839 - DNA, 163 bp, Brachypodium distachyon
ggatgggatgcaattgagggaagctgaacccacaggagtgtcactgagaacacaggtgcagatgccaatgcatggtgagttttcatttttgcatcgcaattgtgttctcaggtcacccctttgggttgcttcccttgattccatggccaggttatgtgtcatg

SEQ ID NO: 1840 - DNA, 142 bp, Arabidopsis lyrata
gatatattttgaaggtagtggatctcgacagggttgatatgaggacacatgtgtaatcaacggctgtaatgacgccacgtcattgttacatgtgttctcaggtcacccctgctgagctctttctctaccgaccatctttatc

SEQ ID NO: 1841 - DNA, 182 bp, Arabidopsis lyrata
taatcagtggaagtaaagtatgaagaaaaagagaagaacaacaggaggtgaaatctcaaaggagtgtcatgagaacacagatcctatggtttctttacattttcattgaaaccattgagtttgtgttctcaggtcacccctttgaatctcccctgttcctttattttaccttaccaaaatta

SEQ ID NO: 1842 - DNA, 263 bp, Arabidopsis lyrata
aacgcgtatgtgacgaaagtagtgtgcagccaaggatgacttgccgatttaaatgatctttctttatactctattaagacattttaagtttcaaatttctttggttcttcaaggattaaggaagaaagtaggctatatatgtagatatatatattatgctgtattaaatatatgtacaagataagaccaaaaaagaaaaagtaacaatcatgatcggcaagttgtccttggctacacgttactttgtgtcgcgcataggtgtt

SEQ ID NO: 1843 - DNA, 126 bp, Zea mays
gcagccaaggatgacttgccgggtattttgagcatgcatgttacaggggagcatatgcaatctgtttggaattttgagcccataccgtgcggtgcctgtcttccggcaagttgtccttggctacat

SEQ ID NO: 1844 - DNA, 130 bp, Zea mays
taggctcggggactatggtgcagccaaggatgacttgccgatcgatgtgacgcctcttgatctcgtcgtcgtcagatcgtcgccgatcatcggcaagttgttcttggctacaccgtggctcctgctcctg

SEQ ID NO: 1845 - DNA, 156 bp, Zea mays
taggctcggggactacggtgcagccaaggatgacttgccgatctatcgtcgatcaacgagcgacgcctctgatgtctgatctcgacatctatcgtcgtcagaccatcatcatctatcggcaagttgttcttggctacaccgtggctcctgctcctg

SEQ ID NO: 1846 - DNA, 150 bp, Zea mays
accagagctgattcgttcagtagccaaggatgacttgcctaggtatatatgcatgggctatggctacatgcctgagagccagtctcttgtgacgctgagcatgtatagtgtaggcatgtcttccttggctactcggagcggctctagtca

SEQ ID NO: 1847 - DNA, 379 bp, Arabidopsis thaliana
tgcctataaataccttcatcacgagtatgacaagatcacaagacaagaaaagaaaggtagagaaaacatgataatgatgattacgatgatgagagtctctagttgtatcagagggtcttgcatggaagaatagagaatgaggttgagccaaggatgacttgccgggtttttttaccaatgaatctaattaactgattctggtgtccggcaagttgaccttggctctgtttccttctcttcttttggatgtcagactccaagatatctatcatcatgaatcgtgatcaaactttgtaatttcattgaaatgtgtttttcttgatgcgaattttttggcttacggtttttcgatttgaatgatcagatttttgtttttgca

SEQ ID NO: 1848 - DNA, 173 bp, Arabidopsis lyrata
gtgcccaacggagtagaattgcatgaagtggagtagagtataatgcagccaaggatgacttgccggaacgttgttaatcatacgtataaattatgtgatgaacatatttctggcaagttgtccttcggctacattttgctctcttcttctcatgcaaactctctttgggatat

SEQ ID NO: 1849 - DNA, 292 bp, Arabidopsis lyrata
gtctcatctaaagccttgaatgtgggaaaaaggccattgttgttcagccaaggatgacttgccggtagctttgtatatttactctatattcggtttatattatggagattatgctttatatatatatatacatagttttaattgattttttttcgtacgtacgtaatctaatacgaaaaagtatttacttatttatatgtgtgttggtgagatgtgtaaacaaagcaagcccggcaagtcatctctggctatgcaactgcctcttcctctcattctaggcttacgatgacac

SEQ ID NO: 1850 - DNA, 155 bp, Arabidopsis lyrata
gtatctttgagtcttacatggaaaaaatagagaatgagattgagccaaggatgacttgccgatttttatcaacaaatcttaactgattatggtgcccggcaagttgaccttggctctgtttccttctcttcttttcgatgtcaaactctagatat

SEQ ID NO: 1851 - DNA, 174 bp, Arabidopsis lyrata
gtcactaattgtatcatagagtcttgcatggaaaaaatagagaatgagattgagccaaggatgacttgccgaatttattaacaaatctcaaatgattatggtgcccggcaagttgaccttggctctgtttccttctcttcttttcgatgtcaaactctagatatatcaatcgat

SEQ ID NO: 1852 - DNA, 184 bp, Arabidopsis lyrata
tgtatcagagggtcttgcatgaaggaataaagaatggaattgagccaaggatgacttgccggtttaaacacaaccggattatgaccattgatttggtctcattcacaatctgttgattcgtgtctggcaagttgaccttggctctgcttcgttctctattcttccatgttagattccagatata

SEQ ID NO: 1853 - DNA, 202 bp, Arabidopsis lyrata
atgatgatgatgagtctctagttgtatcagagggtcttgcatggaagagtagagaatgaggttgagccaaggatgacttgccgggttttttaccaatgaatcttaactgattttggtgtccggcaagttgaccttggctctgtttccttctcttcttttcgatgtcagactccgcgatatatatctatttcatcatcgtcat

SEQ ID NO: 1854 - DNA, 138 bp, Zea mays
gtagccaagaatgacttgcctatgcacgccctctgttggcagttccgtccggcagccatggcgacggttgcacaaggtgagtttttgcggcgtggatgatgcaatgtggctgcatcggcaggtcttcttggctagcca

SEQ ID NO: 1855 - DNA, 65 bp, Zea mays
gtagccaaggatgacttgccggcattatatttcttggcccgccggcaagtcatctggggctacgc

SEQ ID NO: 1856 - DNA, 205 bp, Arabidopsis lyrata
tagaaaatcatataagagaaaatggtgacatgaagaatgagaacttgtgtggtagccaaggatgacttgcctgcgttttaacaatacaatatcaaagactactcgatcgatcgatagtcttagagttggttagtcgtcaggcagtctccttggctattcaaacaattcttgttctcctcatttcacatctctctttcgttttttg

SEQ ID NO: 1857 - DNA, 300 bp, Arabidopsis lyrata
gaatgaggcaaaacatattgagtaatggagtgtataatgaggaagagaggtctaacatggcgaaaagagtcatgtttaatagccaaggatgacttgcctgatctttttcacctccatgattcaatttgaagttcatgcgttttggattattatgcatctaaaaggtataataattcgaaaatcatgttgaatcatgcgggttaggtttcaggcagtctccttggctatcttgacatgcttttttcatccatgttatacctgtttttctttctgtctctaaagtcactattaagtctcttc

SEQ ID NO: 1858 - DNA, 203 bp, Arabidopsis lyrata
gaaggagatgtcaaagatgaataagagaaccacatttggtagccaaggatgacttgcctgtttctttgaacaaaatggttggtgtcatgtttgatgtgactacaagttatatcaagaatgacattttgcttataaaaagacatcaggcagtctccttggctatccttatatgttcttctttctcatctcagacatttaccttc

SEQ ID NO: 1859 - DNA, 272 bp, Arabidopsis lyrata
gttaagaaatgtatgatgaagatgagaggtctaacatggcgaaaagagtcatgtttaatagccaaggatgacttgcctgatctttttcacctccatgattcaatttgaatttcatgggttttggattattatgcatctaaaaggtgtaataattcgaaaatcaagttgaatcttgcgggttaggtttcaggcagtctccttggctatcttgacatactcttttcatccatgttatacctaattttctttttttattgaggatatttgaggat

SEQ ID NO: 1860 - DNA, 191 bp, Zea mays
gatgagagtggtagctctggtagccaaggatgacttgcctgtgtgctggccacgctcccctcatgcaaggaccatctcgtgtcgaccgacgagcgagcgagcgatcgatcgatgagaggatgacgaagcttggggtgtacgttggtctctcacgggcagtctccttggctagccctgactcactcttaccg

SEQ ID NO: 1861 - DNA, 151 bp, Zea mays
gcgataagagtctgtccagatagccaaggatgacttgcctgtggcttcttggcttggcttggctcgggcaaaaccttgtgcacgttttattgctcgcctcgtggcctcgatcacaggcagtctccttggctagtccgggcgggccccttat

SEQ ID NO: 1862 - DNA, 133 bp, Zea mays
cgatgagagcactgctctggtagccaaggatgacttgcctgtggcctccatcagtcgcagaggacgctgttcttctgcttgtggttgtcgatcgcaggcagtctccttggctagcccgagcggctctcatcca

SEQ ID NO: 1863 - DNA, 89 bp, Zea mays
gtagccagggatgatttgcctgtggttcctgtcgttgccatgccaatgcctgtactgttcgatctacgggcaaatcatccctgctaccg

SEQ ID NO: 1864 - DNA, 101 bp, Zea mays
ttagccaagaatggcttgcctatctccattattttgttcatcgcaggaagcccttccgtgatggatgaaatgtggatgatggcatccattcttggctaagt

SEQ ID NO: 1865 - DNA, 104 bp, Zea mays
ttagccaagaatggcttgcctatctccactgtttggttcgtcttgggagaccaccctgatgatgggtgtactgtgtggatgatggcaggccttcttggctaagc

SEQ ID NO: 1866 - DNA, 210 bp, Arabidopsis lyrata
gaaggagatgtcaaagatgagtaggagaatcatatttggtagccaaggatgacttgcctgattcctttgcgtaaaatggttagtgtcatgtttgacaaagtgactatcaattacatcaagcgatgaccattttgcttataaaaaagatgtcaggcagtctccttggatatccttatatgttcttctctttcatctcagacattcatcttc

SEQ ID NO: 1867 - DNA, 230 bp, Arabidopsis lyrata
tcattatttagaaggaaatgtcaaagatgaataggagaatcatatttggtagccaaggatgacttgcctgtttctttgagtaaaatggttattgtcatgtttgacaagtgactataagttatatcaagtaacgaccattttactcatcaaaagacatgaggcagtcttcttggctatccttatatgttcttctgtctcatctcagacgttaaccttcatctaaaataaga

SEQ ID NO: 1868 - DNA, 252 bp, Arabidopsis lyrata
gaagtgtataacgaggaaaagaggtctaacatggcgaaaagagtcatgtttagtagccaaagatgacttgcctgatctttttcacctccatgattcaatttgaattccatgggttttggattattatgcattttaaaagcataatagttcgaaaatcatgttgaatcttgcgggttaggtttcaggcagtctctttggctatcttgacatgcttttttcattcatgttatacctatttttctttctgtcttc

SEQ ID NO: 1869 - DNA, 158 bp, Aquilegia caerulea
gcatgaaagtaggaggcgtgtttagtagccaaggatgacttgcctaccaagggtctcattttaaggcattatcttccttggataatgcgtctggaatcctcgactggttaataggcagtctccttggccaacttgactgcctcctattactcatgcta

SEQ ID NO: 1870 - DNA, 187 bp, Brachypodium distachyon
atggagatggagagcctcccttgattttggtagccaagaatgacttgcctatgcttgccctctgctaaccagctagccatgcatggtaaccaatggacaaatttcttgtggttggcgtggttagtgtggttgcatgggtgggtcttcttggctagccagagcggctctcatccaccatgccaggcca

SEQ ID NO: 1871 - DNA, 164 bp, Brachypodium distachyon
cttgcatgagggccagagcctgcttcctccggtagccaaggatgacttgcctatatttgctccttcagaagtcctggttaattacatgccaggtttcagatgagtttggcgataggcagtcaccttggctagcctgagtggctcttgcctcttatggaaggcct

SEQ ID NO: 1872 - DNA, 175 bp, Brachypodium distachyon
tggagacgaggagcccctttgcaggctctaccagccaagaatggcttgcctatgcccacgttctgtttcatcaccactgggcttaatcttggagccctggtgatggatgagatgtgattgtatggtcaagccatcttggctagaagagagatcctcgtcccccatgctaggctgc

SEQ ID NO: 1873 - DNA, 176 bp, Brassica napus
agatgaatagaagaatcatatttggtagccaaggatgacttgcctatttcttgagagtaaaatgggcatggtgtcatgttaaaagttactgtaggtagtttcaatttgaccattttccttacaaatgatattaggcagtctccttggctatccttatatgttcttctctctcatct

SEQ ID NO: 1874 - DNA, 220 bp, Brassica napus
gaaggagatgtcaaagatgaataggagatttctatttggtagccaaggatgacttgcctacttctttgcgaaggaaaatggtcacggtgtcatgtttgaaagtgaatatacatttttaagagtatatcaattagtgaccattttgcgtataaaaagatattaggcagtctccttggctatccttatatgttcttctttctcatctcagacatttaccttc

SEQ ID NO: 1875 - DNA, 277 bp, Brassica napus
gtttcaggcagtctccttggctatcttgacatgcttttttcttccatgttataccttctttctttgtatttttcgaatccaaataatatttttttctataaatttactacgaaaatcctttaaacaatctctaacaaagtatgttattagaaaactaccactttttgcatttattacaaatgcatgtacgtggtgagtgtatgcattctttagaaggaaatgtcaaaggtgaatagaagaatcatatttggtagccaaggatgacttgcctatttct

SEQ ID NO: 1876 - DNA, 201 bp, Brassica napus
gtcaaagatgaataggagaattctatttggtagccaaggatgacttgcctacttctttgcgaaggaaaatggtcacggtgtcatgtttgaaagtgaatatatatttataagagtatatcaattagtgaccattttgcgtataaaaagatattaggcagtctccttggctatccttatatgttcttctttctcatctcagac

SEQ ID NO: 1877 - DNA, 168 bp, Brassica napus
gagaaacggtgacatgaagaatgagaagttgtgtggtagccaaggatgacttgcctgcgtctttaacaccatatcaaagactttatcgatagtctctgagttggttaggctgtaggcagtctccttggctattcagacactcctctttctcctcatttcacatttctc

SEQ ID NO: 1878 - DNA, 176 bp, Brassica napus
gagaaatggtgacatgaagaatgagaagttgtgtggtagccaaggatgacttgcctgcgtcttagaccatatctatcaaagactaaaagattgatagtcttcgatgaattggttaatcggtaggcagtctcctcggctattcagacagttctctttctcctcatttcacatttctc

SEQ ID NO: 1879 - DNA, 174 bp, Brassica napus
agagtcatgtttagtagccaaggatgacttgcctgctctttttcacctccatgattcaattttatgtacagttttggattactatgcttctaaagagtatagtaattcaaaatcttgttgaatctttgagggtaacagtttcaggcagtctccttggctatcttgacatgcttt

SEQ ID NO: 1880 - DNA, 167 bp, Brassica napus
gtgtttagtagccaaggatgacttgcctgctcttgttcacctccacgattcaactttatacgttgaagggttttggattattgtgcattcaacatgtataataatttgaaatcatgttgaatctttgtgggttaggtttcaggcagtctccttggctattttgacat

SEQ ID NO: 1881 - DNA, 155 bp, Brassica napus
aaacggtgacatgaagaatgagaagttgtgtggtagccaaggatgacttgcctgcgtcttaacaccatatcacagactttatcgatagtctctgagttggttaggctgtaggcagtctcctcggctattcagacactcctctttctcctcatttc

SEQ ID NO: 1882 - DNA, 199 bp, Brassica napus
catggcgaaaagagtcgtgtttagtagccaaggatgacttgcctgctcttgttcacctccacgattcaactttatacgttgaagggttttggattattgtgcattcaacatgtataataatttgaaatcatgttgaatctttgtgggttaggtttcaggcagtctccttggctattttgacatacttttttcatccatg

SEQ ID NO: 1883 - DNA, 150 bp, Festuca arundinacea
ggcacgagggcaaagccttacatggctgcaagggccttacctctgatagccaaggatgacttgcctatgtcttcttcctccctcagatgcctaattagccttggaggtgtggggtctcatgggcagtcaccttggctagcctgagtggct

SEQ ID NO: 1884 - DNA, 139 bp, Medicago truncatula
tttataagccaaggatgacttgcctagctaaaaaccatttacattaattggggacttaatttgtatatgttatgtctgatcgatgatgagtatgtcccttgtttagtttattagcaggcaggtatcctaggctttttga

SEQ ID NO: 1885 - DNA, 170 bp, Oryza sativa
gctgattcggtagccaaggatgacttgcctaatgcctatgtgcatgtgtttatacgctgctcatctgcattttgattatcccctgatcagtcctgtcgtcaattatatgtgtgtgtagtactctgtactcatacatatataggcatgtcttccttggctattcggagcgg

SEQ ID NO: 1886 - DNA, 126 bp, Oryza sativa
ctgcctctggtagccaaggatgacttgcctattgtgctcttctgaatgatgcagtgccatgatcagtgtggcctggctggttcagatgagccgagataggcagtctccttggctagcctgagtggc

SEQ ID NO: 1887 - DNA, 177 bp, Oryza sativa
ctccctttggtagccaagaatgacttgcctatgtgttttgccttgtgttggctcatccatccatctatcagccgttgcagatttgcagtggcagattaaagggtttcagaaagaaattcttgtgatggatgtgcaatgtggctgcatgggccggtcttcttggctagccagagtggc

SEQ ID NO: 1888 - DNA, 173 bp, Oryza sativa
ctccctttggtagccaagaatgacttgcctacgcttttgccctctgttggctcatccatccgtctatctatctgccatggcagatggcagattaagggtttctgaaagaaattcttgtgataggatgtgcaatgaggctgcatgggccggtcttcttggctagccagagtggc

SEQ ID NO: 1889 - DNA, 119 bp, Populus trichocarpa
gagggtttggtagccaaggatgacttgcctatttcctccataaggctttaaaaagcatgaaatgtggtttagagctcaattgaagggttcataggcagtctactttggttatcctagct

SEQ ID NO: 1890 - DNA, 126 bp, Sorghum bicolor
tggcgagagcctgcctttggtagccaaggatgacttgcctacacggccttgcgagttccggttgcatggccagttcagttgggtttgtgggcggtcaccttggctagcctgagtggctcttgcctg

SEQ ID NO: 1891 - DNA, 103 bp, Sorghum bicolor
tggcgagagcctgcctttggtagccaaggatgacttgcctacatggcattgcgagttccggttgcatggccagttcagctgagtttgtgggcggtcaccttgg

SEQ ID NO: 1892 - DNA, 169 bp, Sorghum bicolor
gatggagagcccccttttgctagccaagaatgacttgcctatgcatgccctctgttggcaattcctccagccatggagattgcacaaggtgaatttttgcggcatagatgatggatgcaatgtggctgcatgggcaggtcttcttggctagccagagtgctctcatcca

SEQ ID NO: 1893 - DNA, 92 bp, Sorghum bicolor
tagccaaggatgacttgcctatatcctctctaaaggatcagcaaatattgaggcttctagtggtctcatatgggcagtctccttggctagcc

SEQ ID NO: 1894 - DNA, 93 bp, Sorghum bicolor
ggtagccaaggatgacttgcctatatcctctatgaaggatcagcaaatatcgaggctttgagtggtctcatgggcagtctccttggctagcct

SEQ ID NO: 1895 - DNA, 105 bp, Sorghum bicolor
ttagccaagaatggcttgcctatctccattatttggttcatcagagggacctctgatccctcatgatggatgaaatgtggatgatggcagcccttctggctaagt

SEQ ID NO: 1896 - DNA, 104 bp, Sorghum bicolor
ttagccaagaatggcttgcctatctccattattttgttcatcgatgcaggcctagggatcgtcatggatgaaatgtggatgatggcatccattcttggctaagt

SEQ ID NO: 1897 - DNA, 176 bp, Solanum lycopersicum
gaagaggggttttatatgaagttgagagtattatttagtagccaaggatgacttgcctacttcatttgatatatagtttaaaataataatattgacaatatttgtcatttggtcgtaggcaagttatcctggctatcttgacatgctcgtaatttttcatgtaagaccttatcttc

SEQ ID NO: 1898 - DNA, 152 bp, Theobroma cacao
agattaagagtcttgttgggtagccaaggatgacttgcctatatccaaaaaggattttgaggaaagaaaagctgaatctgataaatctcatcagagtccttttaatggtttctgggcagtctcctttggctatcctgactggctcttatctt

SEQ ID NO: 1899 - DNA, 125 bp, Vitis vinifera
gtctcgtctggtagccaaggatgacttgcctaaatccaccaggtttcaaaacactgaatgtaattatccacaaagcgattccgtggtctttaggcagtcattccttcggctaaactgaccggctc

SEQ ID NO: 1900 - DNA, 150 bp, Zea mays; identical to SEQ ID NO: 1846

SEQ ID NO: 1901 - DNA, 140 bp, Zea mays
cagagctagcctgcctctggtagccaaggatgacttgcctacatggtctcgctagttccggttgttgcatgcatgccactatgccagtcctgctgggtttgtgggcggtctccttggctagcctgagtggctcttgcctg

SEQ ID NO: 1902 - DNA, 128 bp, Zea mays
caataagggcctgcctctgatagccaaggatgacttgcctatgtcctttgtttacaaaggatcagaattgtggacctttgtgttggttcgtaggcagtctccttggctagcctgagtggcccctattg

SEQ ID NO: 1903 - DNA, 101 bp, Zea mays; identical to SEQ ID NO: 1864

SEQ ID NO: 1904 - DNA, 98 bp, Sorghum bicolor
tagccaaggatgacttgcctagctatatgcctgagagcctgtctcttggtggtaaatttgtatgtgctgagcatataggcatgtcttccttggctact

SEQ ID NO: 1905 - DNA, 149 bp, Vitis vinifera
gtcttgtctgatagccaaggatgacttgcctgccctatcccaagtgggtcaatttctttcttttttccaagtagtgtttgatatttgatatatcatgaatccggttgtttgggttccaggcagtcaccttggctaattttacaggctct

SEQ ID NO: 1906 - DNA, 104 bp, Zea mays; identical to SEQ ID NO: 1865

SEQ ID NO: 1907 - DNA, 138 bp, Zea mays; identical to SEQ ID NO: 1854

SEQ ID NO: 1908 - DNA, 106 bp, Zea mays
ttagccaagaatggcttgcctatctccattatttggtccatcttcttgggagacctccctcatggtgtggatggaatgtggatggtggcaggccttctggctaagt

SEQ ID NO: 1909 - DNA, 89 bp, Zea mays; identical to SEQ ID NO: 1863

SEQ ID NO: 1910 - DNA, 88 bp, Glycine max
agattagtggatgtgagccaaggatgacttgccggttgtataatagcacccggtttaagtccttcttggttcttatttactattctta

SEQ ID NO: 1911 - DNA, 184 bp, Arabidopsis lyrata; identical to SEQ ID NO: 1852

SEQ ID NO: 1912 - DNA, 379 bp, Arabidopsis thaliana; identical to SEQ ID NO: 1847

SEQ ID NO: 1913 - DNA, 217 bp, Arabidopsis thaliana
tgatgatgatgatgagtcactaattaattgtatcatagagtcttgcatggaaaaatagaaaatgagattgagccaaggatgacttgccgattttctcaacgaatcttactgattatggtatccggcaagttgactttggctctgtttccttcccttcttttcgatgtcaaactctagatacctaaccacatatcatatatatcatcatcattcatca

SEQ ID NO: 1914 - DNA, 101 bp, Vitis vinifera
tgagtggaatagagccaaggatgacttgccggcaactgcagcaaggcatagggtttaactggtcataactggcaagcatctgaggctctatttcaccctct

SEQ ID NO: 1915 - DNA, 174 bp, Arabidopsis lyrata; identical to SEQ ID NO: 1851

SEQ ID NO: 1916 - DNA, 155 bp, Arabidopsis lyrata; identical to SEQ ID NO: 1850

SEQ ID NO: 1917 - DNA, 154 bp, Arabidopsis thaliana
gtatcatagagtcttgcatggaaaaattaaagaatgagattgagccaaggatgacttgccgatgttatcaacaaatcttaactgattttggtgtccggcaagttgaccttggctctgtttccttcttttcttttcaatgtcaaactctagatat

SEQ ID NO: 1918 - DNA, 167 bp, Arabidopsis thaliana
gggtcttgcatgaaggaataacgaatggaattgagccaaggatgacttgccggtttaaacccaaccggtttatgaccattgatttggtctcattcacaatctgttgattcgtgtctggcaagttgaccttggctctgcttcgttctctattcttccatgttagattc

SEQ ID NO: 1919 - DNA, 114 bp, Ricinus communis
ggacctgagccaaggatgacttgccgcgcatatataaaattctttctgtcgccagcaatcatcgatagcctgaaaagggttttccgtggcaagacattcttggctctacttcac

SEQ ID NO: 1920 - DNA, 100 bp, Medicago truncatula
gaaggtagagagagtggatttgagccaggatggcttgccggcatgcattttagggtgttgctagcgggccatcttgtctcacatttgctatctttcctct

SEQ ID NO: 1921 - DNA, 202 bp, Arabidopsis lyrata; identical to SEQ ID NO: 1853

SEQ ID NO: 1922 - DNA, 102 bp, Vitis vinifera
agtgtggaattgagccaaggatgacttgccggcagctgcagcaaggcattaaggtttaactggctataactggcaagcatccgaggctctgtttcaccctct

SEQ ID NO: 1923 - DNA, 97 bp, Vitis vinifera
agggtggaatagagccaaggatgacttgccggcatttgcagtaagtctatattaactggaacagccggcatgtaatcctggctctatttggtcctct

SEQ ID NO: 1924 - DNA, 107 bp, Populus trichocarpa
agagtggatttgagccaaggatgacttgccgcagatgcatggtccttgctgctgatcacataccaaggggggttttgggtggcaagcatccttggttctccttcgct

SEQ ID NO: 1925 - DNA, 102 bp, Vitis vinifera
agagtggaagtgagccaaggatgacttgccggcagctgcagcaaggcattaaggtttaactggccataactggcaagcatccgaggctctgtttcaccctct

SEQ ID NO: 1926 - DNA, 124 bp, Theobroma cacao
aagaaagggacagtggagtttgagccaaggatgacttgccgggatatttgctgcggagcagtatatgcctcaactgtcttccgaaaagtcatttttggctcaccttcgctctcatgttttccat

SEQ ID NO: 1927 - DNA, 100 bp, Medicago truncatula
aaatggagccaaggatgacttgccggtatattagtttgtcgctaaagctaactagctttagttgttgggtactcccggcaggtcatccttcggctatatt

SEQ ID NO: 1928 - DNA, 163 bp, Brassica napus
tatatgtatcagagagtcatgcatgggaaaatagagaatgataatgagccaaagatgacttgccgattttaccaaagaatttaaaactgataatggtgactggcaagtcgactttggctctgtttccttctcttcttttcgatgtaagactctagatatctat

SEQ ID NO: 1929 - DNA, 120 bp, Glycine max
gtcttgcatgaagaggtagagagagtgcttttgagccaaggatgacttgccggcgtaattacgggtattgccagcgagacatccttgttcacttatgctctcttttcactcatataagac

SEQ ID NO: 1930 - DNA, 105 bp, Vitis vinifera
ggggtcgaattgagccaaggatggcttgccgtcatctgcagcaagagttggagacttttaactgtgcgtgcacggttagtcatccttggctcatttggcccttct

SEQ ID NO: 1931 - DNA, 86 bp, Medicago truncatula
gatttgagccaaagatgacttgccggcatgctgcctgaaaagcaagaagggtgttgttttgctggcagttgtcattggttcatgtt

SEQ ID NO: 1932 - DNA, 101 bp, Medicago truncatula
gaaatggagccaaggatgacttgccggtatattagtttgtcgctaaagctaactagctttagttgttgggtactcccggcaggtcatccttcggctatatt

SEQ ID NO: 1933 - DNA, 108 bp, Populus trichocarpa
ctagagtccgagccaagaatgacttgccggcaggctagcatttgctagctacagggcaagatgtatgctaaagtgacattccgccaggttgttcttggctctactttg

SEQ ID NO: 1934 - DNA, 103 bp, Vitis vinifera
agggtggatttgagccaaggatgacttgccgccatcagcagcaagcattgaagctttaactgggcatggacagcgagttattcttggctcatgcggcccctct

SEQ ID NO: 1935 - DNA, 110 bp, Vitis vinifera
agggtggaattgagtcaaggatgacttgccgttatatatttgcagaagggcacgcaggggcctttagctatgtgttaccggcaagttgacttgactctgtttggccctct

SEQ ID NO: 1936 - DNA, 109 bp, Vitis vinifera
agggtggaattgagtcaaggatgacttgccgatatatatttgcagaaggcatgcaggggcttttagctatgtgtaaccggcaagttgacttgactcagtttggccctct

SEQ ID NO: 1937 - DNA, 101 bp, Vitis vinifera
agggtggaattgagccaaggatggcttgccgtcctttgtcactatttgaggcattaactggtcacgcacggagggttatccttgactcctttagctcctct

SEQ ID NO: 1938 - DNA, 103 bp, Vitis vinifera
agggtggaattgagccaaggatgacttgccgtcctttgcatcaagcattgaagctttaactgggcatgcacggctagttattcttggctcatttggcccctct

SEQ ID NO: 1939 - DNA, 89 bp, Medicago truncatula
agatttgagccaaagatgacttgccggcatgctgcctgaaaagcaagaagggtgttgttttgctggcagttgtcattggttcatgtttg

SEQ ID NO: 1940 - DNA, 89 bp, Medicago truncatula; identical to SEQ ID NO: 1939

SEQ ID NO: 1941 - DNA, 89 bp, Medicago truncatula; identical to SEQ ID NO: 1939

SEQ ID NO: 1942 - DNA, 240 bp, Medicago truncatula
agatgaagccaaggatgacttgccggtataatagtaatttgccacaaatctagatagctattagctatgtttggatgggcggtgagattaacaaaattacagcagcattgtgattttgttgatgctttaaagtgtagtttttatcaaaattacagtggttcactgtaattatgagaatctcaccgtcaatctaaatatgcatttagtttcatttccggcaggtcatccttcggctatatt

SEQ ID NO: 1943 - DNA, 120 bp, Populus trichocarpa
agagtgtgattcagccaaggatgacttgccggcagcaggtaagagcaaagctccgtttttggaagttcaaggatatcttaacttttccggccggcaagctgtccttggctacattgtact

SEQ ID NO: 1944 - DNA, 109 bp, Populus trichocarpa
gtagagatcgagccaagaatgacttgtcggcaggctagcaattgctacgtatagagcaatatgtatgctagaatgagtattccgccaggtcgttcttggctcaactttg

SEQ ID NO: 1945 - DNA, 104 bp, Populus trichocarpa
ccttgcgtggaagccaaggatgacttgcctgagaattttaggaaggtttctatatgaaagctttttattagttttgcaggaagtcaaccttggctttcctatag

SEQ ID NO: 1946 - DNA, 104 bp, Populus trichocarpa; identical to SEQ ID NO: 1945

SEQ ID NO: 1947 - DNA, 755 bp, Citrus sinensis
atcaagtgctaccttatatacagaatagaaagaataacaaaggttggaaattggtctagggtttcttatatgaagggataaatagaggatctagagccaagaatgacttgccgacggcattgaccataatatcatacggcaggccattcttgtctcaactccgctctctatcttctcatctgagactctcggacactgacaaccaacctcagcaatgcagcaccagatgattctttctattctcaggtgatctatgatactatgctcatctaatgagctctgcgtcacatttttatttttcccccatttttctgacttctcctccttgagccatttttccagatccatgaacagtacaaaatctctattacaaccaacagagttaagcaatgctgttcttaatcataagcttattttagggtggcatatattttgcaataatctagttagaaataattaaaagttttttcttggagctttggcgtttctcctggcatttgtacaaccttttatgcaaacagttgtagaattggggatgacacaatctttggttggagtgtgattttatgctgtatttattatgcacacaatagcaggctcgtcgatcctctgttcatgcaagaactagagcgaaggaatagatagcttgattatcgaacaaattaaaataattaatcgtgcatcaattttgacaaggagtgaggaacctctcctcatctgcattatcatgaaattttaataattttgtacatatc

SEQ ID NO: 1948 - DNA, 100 bp, Antirrhinum majus
aggttacgaggtatagccaaggatgacttgccgacgaaagtaagtacattcatgtattttgtaaggtcggcaagttatctttggctacatctctacctaa

SEQ ID NO: 1949 - DNA, 105 bp, Vitis vinifera
agggtggaattgagccaaggatgactggccgtcatttttcagttggtatttgaggctttaactggtcatgcacggctggttatccctgtctcctttagctcctct

SEQ ID NO: 1950 - DNA, 110 bp, Vitis vinifera
agggtggaatcgagtcaaggatgacttgccgatatatatttgcggaaggacttgcatgggcctttagctatgtgtaaccggcaagttgacttgactcagtttggccctct

SEQ ID NO: 1951 - DNA, 96 bp, Vitis vinifera
agggaggaacaaagccaaggatgaattgccggcgatgaaagtaggcagctttgtccatggatcggcaatttatttcttggctatgttgggctctct

SEQ ID NO: 1952 - DNA, 115 bp, Glycine max
aagtgggatgaagccaaggatgacttgccgacattaatttgccattaagctaacgagttaggtagaatcatttgttagattttcccggcaggtcatcctctggctatatttggct

SEQ ID NO: 1953 - DNA, 142 bp, Theobroma cacao
aaagggagggagtgggggcttgagtcaagaatgacttgccggtgtttgcttcttggcaggcattaattaagccggctcaccggccttaacctagtcctccggcaagttgttcttggctcaccttcgctctcttttctttcat

SEQ ID NO: 1954 - DNA, 139 bp, Medicago truncatula; identical to SEQ ID NO: 1884

SEQ ID NO: 1955 - DNA, 123 bp, Sorghum bicolor
tgtagccaaggatgacttgccggccgatcgatgcctcatccctgtccgggaacgtcatgcatgtgatgcaaactgtgaggccgcatcgtcgatcgaccggcaggttcttctctttggctacac

SEQ ID NO: 1956 - DNA, 123 bp, Populus trichocarpa
tcttgtttagtagccatggatgaattgcctgcttccaaaatgaggtgtcaagccgagataaacatacaagtttgatccctcattggggttcccaggcagtcatcagcttggctaacttgacag

SEQ ID NO: 1957 - DNA, 143 bp, Saccharum officinarum
tagccaaggatgacttgccggcaatgcttcgatggatccctaatccccgtccggccgggaacgtcgcacgtatgtatgtatgcgtgcatatgctgcgaactgtgaggcatccatatcgaccggcaggttcttctcttgggcta

SEQ ID NO: 1958 - DNA, 83 bp, Hordeum vulgare
taacacgccagaaataaagccaaggatgagttgcctgatcatcaggactcatggaggtagggctttctgtttttggtgagttt

SEQ ID NO: 1959 - DNA, 146 bp, Saccharum ssp.
gtagccaaggatgacttgccggccgatgcttcgatggatccctcatccccgtccggccgggaacgtcgcacgtatgtatgtatgcgtgcatatgctgcgaactgtgaggcatccatatcgaccggcaggttcttctctttggctac

SEQ ID NO: 1960 - DNA, 65 bp, Zea mays; identical to SEQ ID NO: 1855

SEQ ID NO: 1961 - DNA, 132 bp, Oryza sativa
gctggttgtgtagccaaggatgacttgccggcctggtttgtgttcatcagcaatccagcatatgctgtattgccgtgtgtgatcgatcgatgcatggaccggcaagttattttctttggctacattacaacc

SEQ ID NO: 1962 - DNA, 106 bp, Brachypodium distachyon
gagatagagagtggaatgtagccaaggatgacttgccgggtatgtgcatgtacgcttcagggaattatatgcatccctggtctgaatccatgctgatatttcccgg

SEQ ID NO: 1963 - DNA, 141 bp, Theobroma cacao
aagaagagagcctcgctggaaagccaagaatgacttgcctgcttcctccttgaggtttcaaaatttcaatgaaacttttaaaacccgccattctggctcgcgggcagtcttcttcgctttcttgacaggctattcttttcc

SEQ ID NO: 1964 - DNA, 205 bp, Solanum lycopersicum
ttttaatttggtttcaggcagtctccttggctaccttgacatgctcttttcttttatgcaagatatcttttcaaaatagaagttttagtcatcgttaaaatatcgagacggggttacaagtcttatttaaaagaagagaagtctagcatgatgagaagagtcttatttggtagccaaggatgacttgcctgcaccgtacttgaaa

SEQ ID NO: 1965 - DNA, 151 bp, Brachypodium distachyon
ttgccatacgctaagaggcagagaaggggatgcagccaaggatgacttgccggctcctggtgttgggggaattgcagctttgttgagccttgagttagccggcaggttgtccttggctacacctagttctcttcttctggtgtttggccct

SEQ ID NO: 1966 - DNA, 239 bp, Populus trichocarpa
ttatgtggtgcagccaaggatgacttgccggaataagctatgatcaatagctatagctatggtatttttcatcctaggtttggctatatatatatatatatatagccagttaattgctataaatctcagcacatttatgttttatatgtctgcacacagacacacacatcattgaatgttgatgttccacctcctatgatcagtagtcaatcggcaagtcatctctggctactcaactc

SEQ ID NO: 1967 - DNA, 108 bp, Oryza sativa
ttatctctgatagccaaggatgacttgcctgtgtcctccctgaaggattagcaatttaatgatcctttaagctggttcatgggcagtctccttggctagcctgagtgg

SEQ ID NO: 1968 - DNA, 122 bp, Oryza sativa
ttagctctggtagccaaggatgacttgcctgtgtccttgtgtgtaaggatcattaattattattcagaaaatgatcctttcagcaggtttcatgggcagtctccttggctagcctgagtgat

SEQ ID NO: 1969 - DNA, 213 bp, Arabidopsis thaliana
ttagaaggagatgtcaaagatgaataggagaacaatatttggtagccaaggatgacttgcctgcttctctgaacaaaatggtcgatgtcatgttttgaagtgactataagttataccaagaaatgaccattttgtttataaatagacatcaggcagtctccttggctatccttatatgttcttctttctcaactcagatatttaccttcatcc

SEQ ID NO: 1970 - DNA, 138 bp, Oryza sativa
tgagtcctggtagccaaggatgacttgcctgtatatttatatatatatgtgtgtgtgatcaatggatggattgatcaagctgcttgcaggctcatgcatatatatgtacaggcagtctccttggctagcccggctacc

SEQ ID NO: 1971 - DNA, 203 bp, Populus trichocarpa
tcttgtttggtagccaaggatgacttgcctgtagcctccctcggattcatgaacacgagcatttatgtggtgctcaaaagaaaaggagagaatgatcccagctggcagcgacaaggtcaatccattgaagtagcgagaagcaggtgatttatagctagaatccacaagaggttcccagcaagtgtccttggctaacgagacgg

SEQ ID NO: 1972 - DNA, 119 bp, Populus trichocarpa
tcttgtttggtagccaaggatgacttgcctgctcccttcaaggaggtttcatgaaatgcagacatgatctctcgaaacccctgttgggtttcaggcggtctccttggctaacttgacag

SEQ ID NO: 1973 - DNA, 123 bp, Populus trichocarpa
tcttgtttggtagccaaggatgacttgcctgctccattgtaggaggtttccgaaaaaatgcagacatgtataatttcgaaacccctgtttcgtttcaggcagtctccttggctaacttgactg

SEQ ID NO: 1974 - DNA, 137 bp, Populus trichocarpa
tcttgtttgatagccaaggatgacttgcctgctacttgcaagagtttctgcaaagagatcagaaccaaatatgcatggaattatatgtaatgaaactcttgtttgattgccaggcagtctccttggctagcctgaca

SEQ ID NO: 1975 - DNA, 143 bp, Populus trichocarpa
tcttgtttgatagccaaggatgacttgcctgctacatacaagagatcattatgcataaatagaacgaaatatgtacatggtattaattaatgcagtgaaaactcttgtttggttgccaggcagtctccttggctaagctgaca

SEQ ID NO: 1976 - DNA, 156 bp, Oryza sativa
tctgtctagatagccaaggatgacttgcctgtggcctcttggagagagaggtgtagcttaattagcagcatggtttgagcattgcttgatcggttgatcgcttcgcttgctctgcatgagatcttacaggcagtctccttggctagtctgggcggc

SEQ ID NO: 1977 - DNA, 411 bp, Arabidopsis thaliana
tcgtccattatgagtattaattatggttagggaatcttacagaatgaaaatgaaggtgtgaatggattgtctcatctaaagccttgaatgtgggaaaaaggccattgttgttcagccaaggatgacttgccggtagcttgtattatgattactctatattcgatttatattatggagatgatggtttatatatatttacttatctacatagttttagttgattttttttcgtacgtaatataatacgaaaaagtatttacttatttatatatgtgtgttggggcaagaagtgtaaccaagctagcccggcaagtcatctatggctatgcaactgtctcttcctctcattctaggcttacgatgacacgtaaaaaatcccaaatatcactaatatgatatgaatatggatga

SEQ ID NO: 1978 - DNA, 125 bp, Oryza sativa
tcgcatctggtagccaaggatgacttgcctgtgtctctgctcatgtgcagtagaagaagatgcatttctagctgctttctgcatatgtgatctcacaggcagtctccttggctagcctgagcggc

SEQ ID NO: 1979 - DNA, 230 bp, Arabidopsis lyrata; identical to SEQ ID NO: 1867

SEQ ID NO: 1980 - DNA, 190 bp, Arabidopsis thaliana
tcatataagagaaaatggtgacatgaagaatgagaacttgtgtggtagccaaggatgacttgcctgcgttttagaccatatatatcaaagactcactcgatcgatagtcttagagttggttggtcgtcaggcagtctccttggctattcaaacaattctcattctcttcattcacatttctcttttttgg

SEQ ID NO: 1981 - DNA, 166 bp, Populus trichocarpa
tatcgtggcgcagccaaggatgacttgccggcaagctcctcacacgtattttgtttcgagtttcattgatggcattgctagatagatatatatgatttcgtaattcaaacttttgggccattgtctggttgaaatgatcggcaagctgtccttggctatgtctcta

SEQ ID NO: 1982 - DNA, 189 bp, Gossypium herbacium
tatagagaggaagaaaaggtctaacatgaagataaagagtcttgtttggtagccaaggatgacttgcctgcacctaatgtccacgaggttttaatacatcaaaaaccctggttgggtcccaggcagtcaccttggctaactagacaggctgttttcattcatgctaggcctcatcttccgccccattgg

SEQ ID NO: 1983 - DNA, 180 bp, Aquilegia caerulea
tagccaaggatgacttgcctgtatcctcttagaggccggcctgcgcgcctgtctctatattatcatacattggaatatatcatccttgtgtggttaataggcgggcctgcctgtctctatattatcatacattggaatatatcatccttgtgtggttaataggcagtctccttggctaac

SEQ ID NO: 1984 - DNA, 212 bp, Arabidopsis thaliana
tagaaggagaagtcaaagatgaatagaagaatcatatttggtagccaaggatgacttgcctgtttctttgagtaaaatgggttagtgtcatgtttgacaagtgactataagttatatcaagcaatgaccattttactcatcaaaagacatcaggcagtctccttggctatccttatatgttcttctctctcatctcagacgtttaccttcat

SEQ ID NO: 1985 - DNA, 205 bp, Arabidopsis lyrata; identical to SEQ ID NO: 1856

SEQ ID NO: 1986 - DNA, 93 bp, Ricinus communis
taattcagccaaggatgacttgccggcacagcctatatatgtcttctactcacagctgctagctaccggcaagttgttcttggctacattgta

SEQ ID NO: 1987 - DNA, 272 bp, Arabidopsis lyrata; identical to SEQ ID NO: 1859

SEQ ID NO: 1988 - DNA, 167 bp, Brassica napus; identical to SEQ ID NO: 1880

SEQ ID NO: 1989 - DNA, 173 bp, Arabidopsis lyrata; identical to SEQ ID NO: 1848

SEQ ID NO: 1990 - DNA, 149 bp, Vitis vinifera; identical to SEQ ID NO: 1905

SEQ ID NO: 1991 - DNA, 292 bp, Arabidopsis lyrata; identical to SEQ ID NO: 1849

SEQ ID NO: 1992 - DNA, 108 bp, Oryza sativa
gtagctctggtagccaaggatgacttgcctgtgtccttgtgtagaggatcattcagaaaatgagccttgaactggttcataggcagtctccttggctagtctgagtcg

SEQ ID NO: 1993 - DNA, 143 bp, Vitis vinifera
ggttatgtggtgcagccaaggatgacttgccggcaactccctttattgtactcatgcatgctcatacttatactgttgtgggcatcatttaagtggcaaaaatggtggtcggcgagtcattcttagctacatttctgcctcat

SEQ ID NO: 1994 - DNA, 181 bp, Brachypodium distachyon
ggtgttgcgtgggcagagaagaagccttacatggcagcaaggggcttatctctgatagccaaggatgacttgcctgtgtcatacttcaaggcttggcaacatgatgcatgagcctttgttgtagtctcataggcagtctccttggctagcctgagtggctcttgcggctcatgccaggctg

SEQ ID NO: 1995 - DNA, 149 bp, Solanum lycopersicum
ggtctataaggtttgcatgaagttgaagagagtcaagttgcagccaaggatgacttgccggaccaaaagttgtgaccattttctagttccggcaagttgtttttggctataagtttgctctcttcttctcatgttatcctcgttagacc

SEQ ID NO: 1996 - DNA, 151 bp, Brachypodium distachyon
gggccatgcaggacgaggcacagagcaggatgcagccaaggatgacttgccggccggctggccggcaatgtcgccgccggcgtgacatgatgcttgcccggcaagtttgtccttggctacaccttgctctctgcccatcatgtgttgccct

SEQ ID NO: 1997 - DNA, 90 bp, Vitis vinifera
gggagtagaatgcagccaaggatgacttgccggagatggggcattcctcgttaatccggcaagttgtccttggctacattgggctctctt

SEQ ID NO: 1998 - DNA, 193 bp, Theobroma cacao
ggaaatgaggctatgtgctgcagccaaggatgacttgccggaaaagctatattttacattatattaccctgttccctgatattaactatatgcttctgtatcaattttaactataaattaataaaatttataataaatgttataagagtttatcggcaagtcgtctctggctatatcactgtttcattttctc

SEQ ID NO: 1999 - DNA, 151 bp, Zea mays; identical to SEQ ID NO: 1861

SEQ ID NO: 2000 - DNA, 152 bp, Sorghum bicolor
gcgataagagtctgcccagatagccaaggatgacttgcctgtggcctcttggcttggcttgagagcttattaactctgtgcacgtttaatttgctcttcttgtggcctcgatcacaggcagtctccttggctagtccgggcggctcttatct

SEQ ID NO: 2001 - DNA, 126 bp, Zea mays; identical to SEQ ID NO: 1843

SEQ ID NO: 2002 - DNA, 191 bp, Zea mays; identical to SEQ ID NO: 1860

SEQ ID NO: 2003 - DNA, 215 bp, Arabidopsis thaliana
gatgaagaagagaggtctaacatggcggaaagcgtcatgtttagtagccaaggatgacttgcctgatctttttcgcctccacgattcaatttcaaattcatgcattttggattattataccttttaaagtataataggtcaaatatcatgttgaatcttgcgggttaggtttcaggcagtctctttggctatcttgacatgctttttccatccat

SEQ ID NO: 2004 - DNA, 118 bp, Populus trichocarpa
gagtgtaattcagccaaggatgacttgccggcagcacgggatctcagagcttaataactagaagatcaaggctgtcattacttttccggccggcaagttgcccttggctacattgtac

SEQ ID NO: 2005 - DNA, 77 bp, Medicago truncatula
gagtgcagccaaggatgacttgccggtaatatatctaattccttggtttcttccggcaagttgttcttgactacatt

SEQ ID NO: 2006 - DNA, 111 bp, Populus trichocarpa
gagtcgaatgcagccaaggatgacttgccggcatttcctcctaagtagcgagcccggcaaggcttctatttggcacgcccggccggcgggttgtccttggctatatttggt

SEQ ID NO: 2007 - DNA, 221 bp, Arabidopsis thaliana
gagtataatgaggaagagaggtctaacatggcgaaaagagtcatgtttagtagccaaggatgacttgcctgatctttttcacctccatgattcaatttgtaattcatgggttttggattattatacattcaaaagtataataatttgaaatcatgttgaatcttgcgggttaggtttcaggcagtctccttggctatcttgacatgcttttttcattcacg

SEQ ID NO: 2008 - DNA, 106 bp, Populus trichocarpa
gagtagaatgcagccaaggatgacttgccggcatttcctcctaggtagctagcaagccttctatttggcatgcctgtccggcaggttgtccttggctaaattttgt

SEQ ID NO: 2009 - DNA, 122 bp, Vitis vinifera
gagagtggagtgcagccaaggatgacttgccggaattcacatatagagtggaatgaggcaatagaccggcctcttctcatggtgtccctggcaggttgtccttggctacctttcgctctctt

SEQ ID NO: 2010 - DNA, 122 bp, Vitis vinifera
gagagtggagtgcagccaaggatgacttgccggaattcacatatagagtggaatgaggcaagaggccggcctcttcccatggtgtccctggcaggttgtccttggctacctttcgttctctt

SEQ ID NO: 2011 - DNA, 124 bp, Vitis vinifera
gagagtggaatgcagccaaggatgacttgccggaatttatatatagtgagaagagaagaggctatatgctttcacatatatagtgaaccctggcaagttgtccttggctacatttgattctctt

SEQ ID NO: 2012 - DNA, 122 bp, Theobroma cacao
gagaggtagagaatttagtgcagccaaggatgacttgccggcgtagacaatactcaaatactaattattattgtatttttccggcaagtctgtccttggctacattggtttctcttcttctc

SEQ ID NO: 2013 - DNA, 176 bp, Brassica napus; identical to SEQ ID NO: 1878

SEQ ID NO: 2014 - DNA, 168 bp, Brassica napus; identical to SEQ ID NO: 1877

SEQ ID NO: 2015 - DNA, 300 bp, Arabidopsis lyrata; identical to SEQ ID NO: 1857

SEQ ID NO: 2016 - DNA, 92 bp, Ricinus communis
gaatacagccaaggatgacttgccggcatcaatttatatatatatatatatatatatatatttatcggcaagctgttcttggctatattcat

SEQ ID NO: 2017 - DNA, 210 bp, Arabidopsis lyrata; identical to SEQ ID NO: 1866

SEQ ID NO: 2018 - DNA, 206 bp, Arabidopsis thaliana
gaaggagatgtcaaagatgaatagaagaatcatatttggtagccaaggatgacttgcctgactctttgtgtaaaatgtttagtgtcttgtttgaagtcactataagttgtatcaagcaatgaccattttgcttataaaaaagatatcaggcagtctccttggctatccttatatgttcttctctttcatctcagacattcaccttc

SEQ ID NO: 2019 - DNA, 203 bp, Arabidopsis lyrata; identical to SEQ ID NO: 1858

SEQ ID NO: 2020 - DNA, 112 bp, Oryza sativa
gaacgggatgcagccaaggatgacttgccggctcctggtattgggggaatctcagctttgctgaagcgccttggagttagccggcaagtctgtccttggctacacctagctc

SEQ ID NO: 2021 - DNA, 128 bp, Oryza sativa
gaacggaatgcagccaaggatgacttgccggtacgtgtatgcatgtttcaaggtactatatgtgcccccaactgttttagatccatgctgacattttccggcaagttgtccttggctacgtcttgttc

SEQ ID NO: 2022 - DNA, 99 bp, Vitis vinifera
gaaagtggattgcagccaaggatgacttgccggcacttggcattaggcaccatcgatcatcttcccggcaagttgttcctggctacattctgctctctt

SEQ ID NO: 2023 - DNA, 183 bp, Brachypodium distachyon
cttacatggagataaggagcctacctctgttagccaggaatggcttgcctacgcacacatttttcggttcatcacaggggcaaaactaacttggagatagcccctagtatgatggacggagtgtggctgcatggtcaagccttcctgactaggagagtgctcctcatcccccatgctaggctg

SEQ ID NO: 2024 - DNA, 133 bp, Zea mays; identical to SEQ ID NO: 1862

SEQ ID NO: 2025 - DNA, 148 bp, Sorghum bicolor
cgatgagagcactgctctggtagccaaggatgacttgcctgtggcctccactccacctgcggcaggaggctcttcttctgcgcgcgcgtgtgtgtgtggttgtcgatcgcaggcagtctccttggctagcctcagcggctctcatcct

SEQ ID NO: 2026 - DNA, 164 bp, Brachypodium distachyon
ccttacatggtgataaggggtttggccctgatagccaaggatgacttgcctgtgcatgtcctcccttgatcgcttgcataatttcatatatgcatgtgatctcgatttatcacaggcagtctccttggctagcctgggtgcctcttatcctccatgctaggcct

SEQ ID NO: 2027 - DNA, 181 bp, Arabidopsis thaliana
cccaacggagtagaattgcatgaagtggagtagagtataatgcagccaaggatgacttgccggaacgttgttaaccatgcatatgaataatgtgatgattaattatgtgatgaacatatttctggcaagttgtccttcggctacattttgctctcttcttctcatgcaaactttccttggg

SEQ ID NO: 2028 - DNA, 199 bp, Brassica napus; identical to SEQ ID NO: 1882

SEQ ID NO: 2029 - DNA, 97 bp, Sorghum bicolor
cagccaaggatgacttgccggctcctcaaatttgaagcgtcgtctaagctgctgaggcttaataaaaacttagtcggcaagtctgtccttggctaca

SEQ ID NO: 2030 - DNA, 103 bp, Glycine soja
cagccaaggatgacttgccggcattagccaagtgaatgagcatcatatatatatatatatatatatatgactcatgttcttgtcggcaagttggccttggcta

SEQ ID NO: 2031 - DNA, 111 bp, Glycine max
cagccaaggatgacttgccggcattagccaagtgaatgagcatcatatatatatatatatatatatatatatatatgactcatgttcttgtcggcaagttggccttggcta

SEQ ID NO: 2032 - DNA, 102 bp, Sorghum bicolor
cagccaaggatgacttgccggatatgtgcatgcatatgttacaaggcagcatatgcaccctgttacaagcctgcctgttctccggcaagttgtccttggcta

SEQ ID NO: 2033 - DNA, 103 bp, Oryza sativa
atttatcgtgtagccaaggatgaattgccggcgtttcacgctgttgatggtgcgtgcatatataagttggcgccggcaagtcatttcaggctacatgtttgcc

SEQ ID NO: 2034 - DNA, 134 bp, Zea mays; identical to SEQ ID NO: 267

SEQ ID NO: 2035 - DNA, 211 bp, Arabidopsis thaliana
atgaagaagagaggtctaatatggcgaaaagagtcatgtttaatagccaaggatgacttgcctgatctttttcacctccatgattcaattttaagttcgtggattttggattattatgcgtttaaaaggtataataatttgagatcatgttgaatcttgcgggttaggtttcaggcagtctctttggctatcttgacatgctttcttcatc

SEQ ID NO: 2036 - DNA, 211 bp, Medicago truncatula
atatgcagccaaggatgacttgccggcgagcctctttcgatacttttatgacataattaatcatgtggatagccaaggtactaaactcactttgcactaaaacaaatatttttgctttagtgcaaacttagtttaggcgcttcgcaacggctagtcaaatgtcctagttccaatgtgattggttgtccggcaagtcgtctctggctacgta

SEQ ID NO: 2037 - DNA, 146 bp, Petunia x hybrida
aggttagtgaaatgcagccaaggatgacttgccggcaagcttgatcaactctacttttttaagtactttttattatagttaaaaactaagaagtggagattaataactttgactggcaagtcatttttggctacatctctgcctca

SEQ ID NO: 2038 - DNA, 139 bp, Theobroma cacao
aggtaaagagtcatgcttggtagccaaggatgacttgcctgcacctttccccaaggattcaagtaaatggctaagaaacctgaaactcctttcaggttgccaggcagtcacctaggctaatctagcaggttcttttccc

SEQ ID NO: 2039 - DNA, 141 bp, Theobroma cacao
agataaagagtcttgtttgatagccaaggatgacttgcctgtacctcacagcaggtttctcttaggttaaaagttcttccttggaagcccctgtctagtttcaggcaattatccttggctaacctgacaggctcttctcta

SEQ ID NO: 2040 - DNA, 174 bp, Brassica napus; identical to SEQ ID NO: 1879

SEQ ID NO: 2041 - DNA, 111 bp, Aquilegia caerulea
aatgcagccaaggatgacttgccggaacgttgttaaccatgcatatgaataatgtgatgattaattatgtgatgaacatatttctggcaagttgtccttcggctacatttt

SEQ ID NO: 2042 - DNA, 132 bp, Theobroma cacao
aagaggtagacagtgtggtgcagccaaggatgacttgccggctaatccctaggaggcatgcatttgccttgtttctctgctttagattattccggctagttgtccttggctacggtgcgctgtcttcttctc

SEQ ID NO: 2043 - DNA, 121 bp, Glycine max
aagaggaagagagagtgatgcagccaaggatgacttgccggcgttattatttgctcatgttcatgctcaccggtttccttgccggcaagttgtgtttggctatgttttgctctcttcttct

SEQ ID NO: 2044 - DNA, 155 bp, Brassica napus; identical to SEQ ID NO: 1881

SEQ ID NO: 2045 - DNA, 132 bp, Brassica napus
tgtgaccaaagtagtgtgcagccaaggatgacttgccgatttaaaatatctgataagtattttatttcgtattttaaagaaaaaaatcatgatcggcaagttgtccttggctatacgtttctttgtgtcgcg

SEQ ID NO: 2046 - DNA, 103 bp, Sorghum bicolor; identical to SEQ ID NO: 1891

SEQ ID NO: 2047 - DNA, 126 bp, Sorghum bicolor; identical to SEQ ID NO: 1890

SEQ ID NO: 2048 - DNA, 175 bp, Brachypodium distachyon; identical to SEQ ID NO: 1872

SEQ ID NO: 2049 - DNA, 118 bp, Populus trichocarpa
tgctgttttctagccaaggatgacttgctcgttagcccttgaaagatgtttcaaatttaggctgcatatgctcagaacctttttctggcttcaggcaatcatcttggctaaatgacag

SEQ ID NO: 2050 - DNA, 174 bp, Brachypodium distachyon
tctttgcatggaagtaggaggccatctttgatagccaaggatgatttgcctgtaaaaccgattgtcgtcgcctctcggtgccgttccaggcactcgaagggagggcggcagcaacaggttctatgggcaagtcagcctggctacccgagtacctcttacccatattccatgcca

SEQ ID NO: 2051 - DNA, 115 bp, Populus trichocarpa
tcttgttagttagccaaggacgacttgcctgttcctagcaatttgggatttgccctggactaagaggcaggaccctcattccgggtttcaggcagtctccttggctaggttgaca

SEQ ID NO: 2052 - DNA, 183 bp, Glycine max
tatgatgctgcagccaaggatgacttgccgataaattctttctctaatttgactttcaattcatgtttgtcaattgatagtgcattagttctaatatatgcatttgattatatagaacactattgtgaaagtgtctttagggatagggtaaattcggcaagtcatctttggctacatgtctat

SEQ ID NO: 2053 - DNA, 130 bp, Zea mays; identical to SEQ ID NO: 1844

SEQ ID NO: 2054 - DNA, 156 bp, Zea mays; identical to SEQ ID NO: 1845

SEQ ID NO: 2055 - DNA, 142 bp, Theobroma cacao
taggcctagaaaggatggtgcagccaaggatgacttgccgactactccctccagcctttgctgtactgttttttatattgaaaaaatggatatagatgaagtgggcaagtcgtctttggctacatttttctttctcctcctc

SEQ ID NO: 2056 - DNA, 147 bp, Theobroma cacao
taggcacagaaagtgaagtgcagccaaggatgacttgccgattctttctcttatatccattcagttttaccaacactagcaactcatatgtaaagacgaatttaaatcggcaagttgtccttggctacatgtttctttttgctccac

SEQ ID NO: 2057 - DNA, 147 bp, Theobroma cacao
taggcacagaaagtgaagtgcagccaaggatgacttgccgattctccctcttgcatccattcagttttgccaacaccagcaactcatatgtagagacgaatttaaatcggcaggttgtccttggctacatgtttctttctgctccac

SEQ ID NO: 2058 - DNA, 92 bp, Sorghum bicolor; identical to SEQ ID NO: 1893

SEQ ID NO: 2059 - DNA, 277 bp, Brassica napus; identical to SEQ ID NO: 1875

SEQ ID NO: 2060 - DNA, 226 bp, Arabidopsis thaliana
gtgacgaaagtagtgtgcagccaaggatgacttgccgatttaaatgatctttctttatactctattaagacaatttagtttcaaacttttttttttttttttttttgaaggattcaggaagaaattaggatatattattccgtataaaatacaagatatataaaaccaaaaagaaaaagtaacatgatcggcaagttgtccttggctacacgttactttgtgtcgc

SEQ ID NO: 2061 - DNA, 188 bp, Brassica napus
gtgaccaaagtagtgtgcagccaaggatgacttgccgatttgaaatatatttttaatactttactaagacatcttttcagtttcaaatttgtcttggagaggctaggaagaaattacaatttatttcgtagtttaaagaaaaaatatgatcggcaagttttccttggctacatgtttctttgtgtcgc

SEQ ID NO: 2062 - DNA, 125 bp, Vitis vinifera; identical to SEQ ID NO: 1899

SEQ ID NO: 2063 - DNA, 147 bp, Solanum lycopersicum
gtctagagagttattgtatgaagaggtagggagtggagtgcagccaaggatgacttgccgagatgttgtagcctaatgcaatgacatatcggcaggtcatctttggctacattttattctctcctattcatgtaaaactttatagac

SEQ ID NO: 2064 - DNA, 201 bp, Brassica napus; identical to SEQ ID NO: 1876

SEQ ID NO: 2065 - DNA, 93 bp, Sorghum bicolor; identical to SEQ ID NO: 1894

SEQ ID NO: 2066 - DNA, 150 bp, Festuca arundinacea; identical to SEQ ID NO: 1883

SEQ ID NO: 2067 - DNA, 181 bp, Brachypodium distachyon
ggaagggtaggatacgtttttgcttgcccgtggccgcgctaacattaggcttggggactatggtgcagccaaggatgacttgccgatcgaaacgatgcacaatatgcatcgatcggcgagttgttcttggctacatcttagctcctgcccctcatgttaggccggcatgcggtggtatgta

SEQ ID NO: 2068 - DNA, 170 bp, Oryza sativa; identical to SEQ ID NO: 1885

SEQ ID NO: 2069 - DNA, 158 bp, Aquilegia caerulea; identical to SEQ ID NO: 1869

SEQ ID NO: 2070 - DNA, 184 bp, Vitis vinifera
gatattatggtgcagccaaggatgacttgccgaaaataatttgctcgatcgttaatgtgcttctccagtttctattgcaatttatgcatagggcaatatatatatcctttatagcttgttaattcagatattgactgaggaatcaataatgggcaagttgtgtttggctacatgtttatctcat

SEQ ID NO: 2071 - DNA, 144 bp, Aegilops tauschii
gagtggtatcatcttttagctcttgcatgtggggaggaggacatgtagccaaggatgaattgccagcgcggagtgatccgtcgcgcaggcaagtcattactggctacgtgtttgcctcgtttcctcatgctggagcgaagatgt

SEQ ID NO: 2072 - DNA, 119 bp, Populus trichocarpa; identical to SEQ ID NO: 1889

SEQ ID NO: 2073 - DNA, 126 bp, Oryza sativa
gagcaaggtgtagccaaggacaaacttgccggatcaacagagaaggactgccagtctccggccaattaattaacctcgccgtcggccatcgccggccggcaagtcatccttggctgcatcctgctc

SEQ ID NO: 2074 - DNA, 252 bp, Arabidopsis lyrata; identical to SEQ ID NO: 1868

SEQ ID NO: 2075 - DNA, 220 bp, Brassica napus; identical to SEQ ID NO: 1874

SEQ ID NO: 2076 - DNA, 176 bp, Solanum lycopersicum; identical to SEQ ID NO: 1897

SEQ ID NO: 2077 - DNA, 121 bp, Vitis vinifera
gaaagtatggtgcagccaaggatgacttgccgactctctacttagccatctgcctttctccaaggaggcttgcagtactgatgaagccggcaagttgtctttggctacatgcttctttctg

SEQ ID NO: 2078 - DNA, 164 bp, Brachypodium distachyon; identical to SEQ ID NO: 1871

SEQ ID NO: 2079 - DNA, 126 bp, Oryza sativa; identical to SEQ ID NO: 1886

SEQ ID NO: 2080 - DNA, 109 bp, Populus trichocarpa
cgtgtttggtagccaaggatgacttgcccactctatggaaagagttctcaagcacacggcagagaggacccttacttcggctctgggcagtcaccttggctatgctgac

SEQ ID NO: 2081 - DNA, 110 bp, Populus trichocarpa
cgtgtttggtagccaaggatgacttgcccactccattgaaagagtttttcaagcatatggtagtgtagaacttttctttggttctgggcagtcatcttggctatgctgac

SEQ ID NO: 2082 - DNA, 173 bp, Oryza sativa
cgccggcggcctgacattgggatcggaggccatggtgcagccaaggatgacttgccgatcgatcgatctatctatgaagctaagctagctggccatggatccatccatcaattggcaagttgttcttggctacatcttggcccctgctcctcatgtaaggccggcctgtggcg

SEQ ID NO: 2083 - DNA, 116 bp, Zea mays
cagccaaggatgacttgccgatctatcgtcgatcaacgagcgacgcctctgatgtctgatctcgacatctatcgtcgtcagaccatcatcatctatcggcaagttgttcttggcta

SEQ ID NO: 2084 - DNA, 90 bp, Zea mays
cagccaaggatgacttgccgatcgatgtgacgcctcttgatctcgtcgtcgtcagatcgtcgccgatcatcggcaagttgttcttggcta

SEQ ID NO: 2085 - DNA, 91 bp, Sorghum bicolor
cagccaaggatgacttgccgatcgatcgatgcaaactcctctgatgtctgatctcatcagattatcgttgtcggcaagttgttcttggcta

SEQ ID NO: 2086 - DNA, 101 bp, Populus tremula
cagccaaggatgacttgccgacgactcgcttttgcttttgcttccatcaatataggcataatcaagaagagatgaatccgttggcaggttgttcttggcta

SEQ ID NO: 2087 - DNA, 150 bp, Zea mays
cagccaaggatgacttgccgacctatttttcttttaacattccaatgtaaatccatggcatatatatatggttgtatatcatattgaagtccagatctagaacattataataaatgttatatagggtttatcggcaagtcatcattggct

SEQ ID NO: 2088 - DNA, 140 bp, Zea mays; identical to SEQ ID NO: 1901

SEQ ID NO: 2089 - DNA, 128 bp, Zea mays; identical to SEQ ID NO: 1902

SEQ ID NO: 2090 - DNA, 103 bp, Sorghum bicolor
atagccaaggatgatttgcctgtagcaacctctgagtgctcctgctgccatggcagtcaggagcgccaagtgggtgcttctccgggcaaatcatctgggctag

SEQ ID NO: 2091 - DNA, 152 bp, Theobroma cacao; identical to SEQ ID NO: 1898

SEQ ID NO: 2092 - DNA, 176 bp, Brassica napus; identical to SEQ ID NO: 1873

SEQ ID NO: 2093 - DNA, 115 bp, Prunus salicina
agagtggagctgagccaaaaatgacttgctgcaattaatcgaaggtgaagcaacaatttgtatatcgttgggcatacatacgcagcaagttgttcttggttctgtttggttctct

SEQ ID NO: 2094 - DNA, 150 bp, Zea mays; identical to SEQ ID NO: 1846

SEQ ID NO: 2095 - DNA, 102 bp, Populus trichocarpa
aagtttgatgcagccaaggatgacttgccgacgactcaatttttgcttccatatggtagaagagatgaataggttggcaggttttccttggctacattttcc

SEQ ID NO: 2096 - DNA, 165 bp, Populus trichocarpa
aagtggtatgcagccaaggatgacttgccgacttaactgatctgtataaattaatgcatgtgtagtcaaaattactactactatatattaatctgatctgtgaccacaaattaactaactactagctagtaattagttggcaagttgtccatggctacatgctgc

SEQ ID NO: 2097 - DNA, 113 bp, Populus trichocarpa
aagattgatgcagccaaggatgacttgccgacgactcgtttttgctttcatcaatatacgcataattaagaagagatgaatccgttggcaggttgttcttggctacatttttc

SEQ ID NO: 2098 - DNA, 115 bp, Theobroma cacao
aagataagagttctgtttggtagccaaggatgagttgcctgctccttccaagaggtttcaaatcttgttgggttgccaggcattcaccttggctaacttgactggctcttttctt

SEQ ID NO: 2099 - DNA, 121 bp, Medicago truncatula
aagaggcagagagagtaatgcagccaaggatgacttgccgacaacgttggcgaatgttcatgtgatttctgcctcattgtgccggccagttgtccttggctatgttagtctctcatcttct

SEQ ID NO: 2100 - DNA, 121 bp, Medicago truncatula
aagaggcagagagagtaatgcagccaaggatgacttgccgacaacattggcgaatgttcatgtgatttctgcctcattgtgccggcaagttgtccttggctatgttagtctctcatcttct

SEQ ID NO: 2101 - DNA, 263 bp, Arabidopsis lyrata; identical to SEQ ID NO: 1842

SEQ ID NO: 2102 - DNA, 107 bp, Populus trichocarpa
tcttgtttgtagccaaggacgacttgcccacaatatgtatcgtgagcgtttccaatttgcaacctcatacttggtttgttttgggcagtctccttggctatgcagat

SEQ ID NO: 2103 - DNA, 118 bp, Populus trichocarpa
tagtagaatgcagccaagaatgatttgccggcgccggccagcacttgttgcaaagcaactaagcaagggcttcaaatgtttttggcaccccggcaagttgttcttggctacatttgga

SEQ ID NO: 2104 - DNA, 101 bp, Populus trichocarpa
gatgttcggtagccaaggacgacttgcccacactatgagacaagtggttagaattagcaacttcttaattggttatgggaagtctccttggctatgctgac

SEQ ID NO: 2105 - DNA, 169 bp, Sorghum bicolor; identical to SEQ ID NO: 1892

SEQ ID NO: 2106 - DNA, 144 bp, Theobroma cacao
gataaagagtctttgtttggtagccagggatgacttgcctacggcttttcaggtggttaatattgatgctatgattatgaatgtaaaacccctggctctggtctgcaggcagtcaccttggctatgctaacaggctcttttctc

SEQ ID NO: 2107 - DNA, 120 bp, Vitis vinifera
gagtggaatgcagccaagaatgatttgccggaatttatatatagtgagaagagaagaggctataggctttcacatatatagtgaaccctggcaagttgtccttggctacatttgattctc

SEQ ID NO: 2108 - DNA, 122 bp, Populus trichocarpa
gagggttgggtagccaaggacgacttgcctatttcctccatggggtcctgaaaagaatgaaatactgtcgttcagagctcattggtagggttcataggcagtctcctttggctatcctaact

SEQ ID NO: 2109 - DNA, 49 bp, Gossypium hirsutum
gacgacaacgtcttccaccgtctcgtcgacgccaaggatgtcttgcgtc

SEQ ID NO: 2110 - DNA, 85 bp, Medicago truncatula
gaatgcagccaagggtgatttgccggcagatatatatgaatattcatagagatgcatgtgtcggcaagttcctcttggctacatt

SEQ ID NO: 2111 - DNA, 107 bp, Populus trichocarpa
cttgtttggtagccaaggacgacttgcccaccaccatcttagttgggtccaatatattactgggcaccttccatttggttttgggcaagcaccttggctagctgaca

SEQ ID NO: 2112 - DNA, 107 bp, Populus trichocarpa
cttgtttggtagccaaggacgacttgcccaccaccatctcagttgggtccaatatattactgggcaccttccatttggttttgggcaagcaccttggctagctgaca

SEQ ID NO: 2113 - DNA, 177 bp, Oryza sativa; identical to SEQ ID NO: 1887

SEQ ID NO: 2114 - DNA, 173 bp, Oryza sativa; identical to SEQ ID NO: 1888

SEQ ID NO: 2115 - DNA, 248 bp, Vitis vinifera
cgttgtttggtagcgaaggatgacttgcctacagcctccttaaggtttcaaaataccgagcttgtctacctttgatcaaatgattcaagaaacaaaagaaaagaaaggccatggcagccatccatcagagtcaacatgagaatcatgttctatagaaattggagtcattcttgagaatgaacacgacactattagcttggaatctataatgtggtttatggcaagtctccttggcacctgatggcctc

SEQ ID NO: 2116 - DNA, 107 bp, Populus trichocarpa
cctgtttggtagccaaggacgacttgcccaccaccatcttagttgggtccagtatattactgggcaccttccatttggttttgggcaagcaccttggctagctgaca

SEQ ID NO: 2117 - DNA, 84 bp, Populus tremula
cagccaaggatgatttgccgacgactcagtttttgcttccatatggtaggagagatgaagaggttggcaggttttccttggcta

SEQ ID NO: 2118 - DNA, 187 bp, Brachypodium distachyon; identical to SEQ ID NO: 1870

SEQ ID NO: 2119 - DNA, 104 bp, Sorghum bicolor; identical to SEQ ID NO: 1896

SEQ ID NO: 2120 - DNA, 105 bp, Sorghum bicolor; identical to SEQ ID NO: 1895

SEQ ID NO: 2121 - DNA, 379 bp, Arabidopsis thaliana; identical to SEQ ID NO: 1847

SEQ ID NO: 2122 - DNA, 240 bp, Medicago truncatula; identical to SEQ ID NO: 1942

SEQ ID NO: 2123 - DNA, 109 bp, Sorghum bicolor
tagccaaggatgacttgccggcatttcttgggtcggatgactgagttgttgagcctggggatgaacagacccggatcgacggccggccggcaagtcatctgtggctacg

SEQ ID NO: 2124 - DNA, 97 bp, Sorghum bicolor
tgatagccaaggatgacttgcctgtgtcctttgtgccgaaggatcagaaatgtgagcctttgagatagatggttcataggcagtctccttggctagc

SEQ ID NO: 2125 - DNA, 98 bp, Sorghum bicolor; identical to SEQ ID NO: 1904

SEQ ID NO: 2126 - DNA, 138 bp, Zea mays; identical to SEQ ID NO: 1854

SEQ ID NO: 2127 - DNA, 89 bp, Zea mays; identical to SEQ ID NO: 1863

SEQ ID NO: 2128 - DNA, 85 bp, Medicago truncatula; identical to SEQ ID NO: 2110

SEQ ID NO: 2129 - DNA, 106 bp, Zea mays; identical to SEQ ID NO: 1908

SEQ ID NO: 2130 - DNA, 104 bp, Zea mays; identical to SEQ ID NO: 1865

SEQ ID NO: 2131 - DNA, 101 bp, Zea mays; identical to SEQ ID NO: 1864

SEQ ID NO: 2132 - DNA, 63 bp, Sorghum bicolor
agggcaaccctccattggcaggtgcgacctacaccctaccctgccaaaggggatttgcccggc

SEQ ID NO: 2133 - DNA, 162 bp, Arabidopsis lyrata; identical to SEQ ID NO: 282

SEQ ID NO: 2134 - DNA, 106 bp, Arabidopsis lyrata; identical to SEQ ID NO: 278

SEQ ID NO: 2135 - DNA, 136 bp, Arabidopsis lyrata
aaaggtgaaaatgcattacagggcaagatctctattggcaggaaaccattacttgacctttgcatctctttatgcattgctttgtagtgagttcttgccaaaggagatttgcccggtaattcttttgcgctaatat

SEQ ID NO: 2136 - DNA, 118 bp, Arabidopsis thaliana
atatgcattacagggcaagatcaccattggcagagatctattacttcattcttgcatcatatgcataaatgtttgtggtgagctctctgccaaaggagatttgcccggtaattctctt

SEQ ID NO: 2137 - DNA, 102 bp, Brassica napus
acagggcaagatctctattggcagaaaaccattacttagatctttgcatctctttctgcattgatttgtagtgagttctctgccaaaggagatttgcccggt

SEQ ID NO: 2138 - DNA, 155 bp, Citrus sinensis
cattgaggtgcatgcatgcagttgcatattacagggcaacatctccattggcaggctgcatacttattacatccatctcatatatacgtatgttcttcagtcagtgtgccttctgccaaaggagatttgcccggcaattcctctgcatttatttt

SEQ ID NO: 2139 - DNA, 126 bp, Populus trichocarpa
ggtgcagttgcattacagggcaagcttccattggcatgcagccactaagacacgcaatatctaacacttgatgcattcctgtagagtgcggcgccatgccaaaggagatttgcccggcaattcttc

SEQ ID NO: 2140 - DNA, 126 bp, Populus trichocarpa; identical to SEQ ID NO: 2139

SEQ ID NO: 2141 - DNA, 106 bp, Ricinus communis
ttacagggcaaaatctccattggcatggaaccactaagatatccaaaccaatcaagccaggatttcaatagtgtgtgccctgccaaaggagatttgcccggcaata

SEQ ID NO: 2142 - DNA, 96 bp, Ricinus communis
ttacagggcaaaaccttcattggcatgctgccagactaagatgtgggacgcattcctatcgtgtgcatcatgccaaaggagatttgcccggcgata

SEQ ID NO: 2143 - DNA, 135 bp, Theobroma cacao
ttcagggtgcaactgcattacagggcaagatttccattggcaggcagccacttatatgtgcacccaaactcattcattcatgtggtgtgccctctgccaaaggagatttgcccggcaattcttttgtactactta

SEQ ID NO: 2144 - DNA, 136 bp, Theobroma cacao
tctctggtgcagttgcattacagggcaaagatctccattggcaggctgccactttgggtcacgaaccgaattatgtgttcctatagtgtgtcttctgccaaaggagatttgcccggcaattcttccgcattgatat

SEQ ID NO: 2145 - DNA, 112 bp, Vitis vinifera
gcatattacagggcaaattatcttttggcaggcagccacttagagacacagccaagccatgcattcttgtagtgtgccctctgccaaaggagatttgcccggcaattcttct

SEQ ID NO: 2146 - DNA, 135 bp, Arabidopsis lyrata; identical to SEQ ID NO: 274

SEQ ID NO: 2147 - DNA, 167 bp, Arabidopsis lyrata; identical to SEQ ID NO: 275

SEQ ID NO: 2148 - DNA, 157 bp, Arabidopsis lyrata; identical to SEQ ID NO: 272

SEQ ID NO: 2149 - DNA, 127 bp, Arabidopsis lyrata; identical to SEQ ID NO: 273

SEQ ID NO: 2150 - DNA, 123 bp, Arabidopsis thaliana
aaatgcattacagggtaagatctctattggcaggaaaccattacttagatctttgcatctctttatgcattgcttttaattagtgagttatctgccaaaggagatttgccctgtaattcttct

SEQ ID NO: 2151 - DNA, 100 bp, Arabidopsis thaliana
ggttggattactgggcgaatactcctatggcagatcgcattggctagatatgcaagtaaaatgcttctctgccaaaggagatttgccccgcaattcatcc

SEQ ID NO: 2152 - DNA, 98 bp, Gossypium hirsutum
tgaggaattacagggcaactctccttaagcaaaaatggatgtgcttttctttgcataattcgattttgccaaaggagatttgccctgccattcactca

SEQ ID NO: 2153 - DNA, 131 bp, Hordeum vulgare
tcagaagaactaggtagatttgccaaaggagatttgccgaactataggtactgtaggtaggttttgccaaaaggagatttgccccgaactatcggtaggtttgccaaaggagatttgccccgaagaactta

SEQ ID NO: 2154 - DNA, 134 bp, Medicago truncatula
tccaagttgcagttgaattacagggtgagttctccattggcaggtagctagtcactatatgatatgcattgcaatcatttcttagtgtgcaatctgccaaaggagatttgcccagcgattctcctgcaactcta

SEQ ID NO: 2155 - DNA, 119 bp, Medicago truncatula
gttctgctgttgaggaatgatagggaaaatctcttttggcagagaggagtaaaaatcttaaacaggaatgtttctggtttgccaaaggagatttgccctgccatttttgacagctattg

SEQ ID NO: 2156 - DNA, 134 bp, Medicago truncatula
tccaagttgcagttgaattacagggtgagttctccattggcaggtagctagccactatatgatatgcattgcaatcatcacttagtgtgtaatctgccaaaggagatttgcccagcgattctcatgcaactcta

SEQ ID NO: 2157 - DNA, 104 bp, Medicago truncatula
ttacagggtgagttctccattggcaggtagctagtcactatatgatatgcattgcaattcatctcttagtgtgcaatctgccaaaggagatttgcccagcgatt

SEQ ID NO: 2158 - DNA, 104 bp, Medicago truncatula
ttacagggcatgttctcctttggcaggtagccatatgctatgatatgcattgcaaccatactctttgagtgtgtaacctgccaaaggagatttgcccagcaatt

SEQ ID NO: 2159 - DNA, 90 bp, Medicago truncatula
aatgatagagcaaatctctattggcagaacgaagtagaaagcttggacatgcatgcttctggtttgccaaaggagatttgccctgccatt

SEQ ID NO: 2160 - DNA, 90 bp, Medicago truncatula
aatgatagagcaaatctctattagcagaacgaagtagaaagcttggacatgcatgcttctggtttgccaaaggagatttgccctgccatt

SEQ ID NO: 2161 - DNA, 118 bp, Oryza sativa
acatgcattaccgggtgagtcttccttggcagtgttcgaatcggcagtaccggtctgcaagtgatcggtcaatcaccagttcaccgctgccaaaggagatttgcccagcaatgcaact

SEQ ID NO: 2162 - DNA, 117 bp, Oryza sativa
tggtggattaccgggccatgtctccttgggcagaggtgatcagattgcacacttcacttcaacctcttgctctagcttgttctctctgccaaaggagatttgcccagcaatccacat

SEQ ID NO: 2163 - DNA, 119 bp, Oryza sativa
atgtgcattgcagggcaactactccattggcagagggatggattggatatggatatggctgatgcttccatttgatcccatccctatctgccaaaggagatttgcccagcgattcactc

SEQ ID NO: 2164 - DNA, 120 bp, Populus trichocarpa
gcaataattaccgggcaattactcctttggcagctggccactcaacggcggcaggtgatcaaattcaccaatgcaaacaagtaagctcgctgccaaaggagatttgccccgcaattcatc

SEQ ID NO: 2165 - DNA, 112 bp, Populus trichocarpa
tgcattacagggcaagacctccattggcaggcagccactaaagcatgcatttaaattatgcgttcttttaagtgtgccctctgccaaaggagatttgtccggcaaatcttct

SEQ ID NO: 2166 - DNA, 108 bp, Ricinus communis
ttacagggcaaatatctccattggcaggtagccactttagacatgcatttaaattttgagcattatttaacagtgtgccttctgccaaaggagatttgcccagcaatt

SEQ ID NO: 2167 - DNA, 126 bp, Sorghum bicolor
acatgcggggccatgcattaccgggtgggtctcctctggcagtaacttggctggtcgcctggtccatgatacctgcgtgcagacactgccaaaggagatttgcccagcaatgcagttttgagtccc

SEQ ID NO: 2168 - DNA, 120 bp, Sorghum bicolor
catatgcgagtcgaggattaccgggccatttctccttgggcagagtaattgaattttactttgctggatccggtttgctctgccaaaggagatttgcccagcaatccacatttgtaatat

SEQ ID NO: 2169 - DNA, 117 bp, Theobroma cacao
aaagatgcatggatgcattacagggcaaatctcctttggaagtcagctgaactcgaggcatgggagataagctcactgccaaaggagatttgccccgcaattcagccatgctaaacc

SEQ ID NO: 2170 - DNA, 154 bp, Arabidopsis lyrata; identical to SEQ ID NO: 276

SEQ ID NO: 2171 - DNA, 125 bp, Arabidopsis lyrata; identical to SEQ ID NO: 277

SEQ ID NO: 2172 - DNA, 191 bp, Arabidopsis lyrata; identical to SEQ ID NO: 283

SEQ ID NO: 2173 - DNA, 135 bp, Arabidopsis thaliana
tcactagttttagggcgcctctccattggcaggtcctttacttccaaatatacacatacatatatgaatatcgaaaatttccgatgatcgatttataaatgacctgccaaaggagagttgccctgaaactggttc

SEQ ID NO: 2174 - DNA, 114 bp, Arabidopsis thaliana
ggagcagtaatagggcatctttctattggcaggcgacttggctatttgtatcttttgtgttcttgactattggctatgtcacttgccaaaggagagttgccctgtcactgcttc

SEQ ID NO: 2175 - DNA, 109 bp, Arabidopsis thaliana
gaaagcattacagggcgaatcctctattggcagtggaagttgatgacccttatatgttattttctcatcattttcctctgccaaaggagatttgcctcgcaatgcttca

SEQ ID NO: 2176 - DNA, 160 bp, Brachypodium distachyon
cgtgttattgagatgagggtgagaattacagtgcggttctcctctggcacggaggtcgagggtagccggcggcaatccggccagcggcgaggctgccagtccgtccccttgccaaaggagaattgccctgccattcataaccctcctgggtttatacata

SEQ ID NO: 2177 - DNA, 149 bp, Citrus sinensis
tcaatacaaagtgacaatgtggttgaggaataacagtgcagtcctcctttggcgtgcagattgcaaagagataatgcatattatttcattcatttgcatccttctgtttgccaaaggagaattgccctgccattcactctcgcagctag

SEQ ID NO: 2178 - DNA, 130 bp, Citrus sinensis
aaagcagttttagggcacctcttacttggcatgcaatggtgatttattggtgcaataatcagcattatattggttaattcgatatcaatcccactgatatgccaaaggagagttgccctgtgactgcttc

SEQ ID NO: 2179 - DNA, 154 bp, Citrus sinensis
atttgcatccttctgtttgccaaaggagaattgccctgccattcactctcgcagctagttgtaattgttgcaagattccagcagcctcattcaatttgtttgccaaattaatgtaacaaacgatttcatcatttaccattctgagttcaatatg

SEQ ID NO: 2180 - DNA, 94 bp, Medicago truncatula
aatgataggggaaatctcttttggcagagaggagtagctagagagcttgaacatgcttgcttctagtttgccaaagaagatttgccctgccatt

SEQ ID NO: 2181 - DNA, 79 bp, Medicago truncatula
aacaatagggcacctctctcctggcaagtaaaaagggctcagtgccaataacttgccaaaggagagttgccctgtggct

SEQ ID NO: 2182 - DNA, 79 bp, Medicago truncatula; identical to SEQ ID NO: 2181

SEQ ID NO: 2183 - DNA, 149 bp, Oryza sativa
ctgtgaattacagggcagttcacctttggcacaagggcaagcagtagaaaccatgcgtgcttgctagagctggaaatgatgctggtagcattgcatggttcagggatcacagatctcgtgccaaaggagaattgccctgcgattttgtc

SEQ ID NO: 2184 - DNA, 97 bp, Oryza sativa
gtgagaatcacagtgcgattctcctctggcatggcatgagaggcctaaaaaagagacgcactgccgtgccaaaggagaattgccctgccattcagaa

SEQ ID NO: 2185 - DNA, 110 bp, Oryza sativa
cggcgaattacagggcggtttctcctttggcacgtacggaggcaaggcatgcggtgaaaaatctctagctagccatgcgtgccaaaggagaattgccctgcgattcacca

SEQ ID NO: 2186 - DNA, 286 bp, Oryza sativa
aagacagtagtaggcagctctcctctggcaggtgcattctaggtgattttgtaattgtatatgcatccaaggtatatacagtccggccatggtgctacattgcaatcatccatatgtgattgcattgtgtatatatatacatggtggcctttgatagaccatcatatatcggttggttatgtgcatgtatgtatataccagctgctactagctttgatcgatcgccatgtagcgattgaattcaccaaaacggcctgccaaaggagagttgccctgcgactgtctt

SEQ ID NO: 2187 - DNA, 99 bp, Oryza sativa
ccatgcattactgggcaggtctcccttggcagtggccgatcgagctgatcaaaccacgcaaaagccactgccaaaggagacttgcccagcaatgcagat

SEQ ID NO: 2188 - DNA, 106 bp, Oryza sativa
agctgcattgctgggcaagttgtcctttggcagatgttgcagttcatcatcgatgcctgggggttaccagactactgccaaaggaaatttgccccggaattcatct

SEQ ID NO: 2189 - DNA, 114 bp, Populus trichocarpa
ggatgcattactgggcaattcttctgttggcagctggtgactcatactgcactagctgagattaagcagcaagagtttgctcactgccaaagaagatttgccccgcaattcctt

SEQ ID NO: 2190 - DNA, 114 bp, Populus trichocarpa
ggatgcattactgggcaattcttctgttggcagttggtgactcatactgcactagctgagattaagcagcaagagtttgctcactgccaaagaagatttgccccgcaattcatt

SEQ ID NO: 2191 - DNA, 101 bp, Populus trichocarpa
taaagaataacagggctttatcctcctttggcaaacagaacatggaaataaatgcctgcatatttctgttttgccaaaggagaattgccctgccattcgat

SEQ ID NO: 2192 - DNA, 94 bp, Populus trichocarpa
tgatgaataactgtgcaattctcctttggcagacgtatatggcgttcggacaccaactttggactgccaaaggagaattgccctgccattcaac

SEQ ID NO: 2193 - DNA, 223 bp, Phaseolus vulgaris
tgcacaagatattatagtcaataagcaaaccagttatagggcttctctttgttggcaggaaatgacatgaccacttcatgaaatatcttgccaaaggagagttgccctgttgctgctttagcttaatatgtaatcttctatgctattcagtgcatatgatcattcactccattgaagagaagcactgaagtagtatgcaagggatcaaacaaatgacttcatc

SEQ ID NO: 2194 - DNA, 93 bp, Ricinus communis
ttgtagggcacctcttgcttggcaggtaaaggggacactagctagcataacatcccaataacttgcttgccaaaggagagttgccctgtgact

SEQ ID NO: 2195 - DNA, 136 bp, Sorghum bicolor
tgccggcgccggcgaattacggggcagttcgtctttggcacaaaggcacgtccagaactactcgatgagggtcacttgagctgaactgaacatgcgtgccaaaggagaattgccctgcgattcgcccgtgcagaag

SEQ ID NO: 2196 - DNA, 130 bp, Sorghum bicolor
catatgctgagcatgaattacagggtacatctcctttggcacagatgcatgcagcagaatgcatatatgcatatgcgaaactgtcgagcgtgccaaaggagaattgccctgcgattctaggctctgcaat

SEQ ID NO: 2197 - DNA, 205 bp, Sorghum bicolor
gtgcaggctgaagacagttgtaggcagctctcctctggcaggcggtcatcgtcgtcgtcatcgacggctggttctgtgttcatccggatccatcgtgcagccgtgcatgcatgcagtaatattcggttacatgcatgcattatgcacgcacgtacgtcgtcgtcctgccaaaggagagttgccctgcgactgtctccagcttcct

SEQ ID NO: 2198 - DNA, 125 bp, Sorghum bicolor
ccagatgtgcacttgcattgctgggcaacttctcctttggcagatgcgcaatgtgctccgaccctggggcttcttccgcgcctactgccaaaggaaatttgccccggaattcacctgcacagcca

SEQ ID NO: 2199 - DNA, 132 bp, Sorghum bicolor
agtgttcagggtaagaatcacagtgcggttctcctctggcatggaggccaacatagcaggcattggagaatgcacagcgctatcgccatccctgccaaaggagaattgccctgccattcggtataaccctgg

SEQ ID NO: 2200 - DNA, 121 bp, Sorghum bicolor
atgcctaagctgtccagtttcagggcttctctttcttggcagggagcatgagaagccatagctctgctctgttctgccctctgccaaaggagagttgccctgtaacaggactcagcttatg

SEQ ID NO: 2201 - DNA, 93 bp, Sorghum bicolor
agtgcggttctcctctggcatgaacgacggctggagcagcttgccacatggctcggccacggcccttgcttgccaaaggagaattgccctgcc

SEQ ID NO: 2202 - DNA, 141 bp, Theobroma cacao
tttcagctgcagttgcattacagggcaaatcttcactggcaggcagccactttggcttaccatcacctgtcatgcttttttttttttttattgtgctctctgccaatggagatttgcccagcaattccactgcaacattgg

SEQ ID NO: 2203 - DNA, 111 bp, Theobroma cacao
tgtggagttgaggaattacagagcaattctccttcagcacaaatgcttatgctccttcatagttctattttgccagaggagatttgccctgccattcactcacacaatgat

SEQ ID NO: 2204 - DNA, 112 bp, Theobroma cacao
tgtgcagttgacgaataacagtgcagtccttctttggcacagagaagacatggcatacgtgacttctgttttgccaaaggagaattgccctgccattcattcctgcagttac

SEQ ID NO: 2205 - DNA, 157 bp, Theobroma cacao
gtcaataagcaaaccagtcaaagggcacctctccattggcaggtaatattgtgattactgctgtaattaattatgcaaagtgggactccccggccctgcacttcatttcacagacttgccaaaggagagttgccctgtgacagattcagcttaatgc

SEQ ID NO: 2206 - DNA, 97 bp, Vitis vinifera
gagaataacagtgtgattctcctttggcagagatatcacgcatggagtagaaggcggtagctgctctgccaaaggagaattgccctgttattcaatt

SEQ ID NO: 2207 - DNA, 117 bp, Vitis vinifera
atcaatcatagggcacctctttcttggcaggcactggctcctatatatgaatatacatagcttagctgcagtaaaaagatgtgacttgccaaaggagagttgccctgtgactgcttc

SEQ ID NO: 2208 - DNA, 82 bp, Vitis vinifera
accggtctcagggcctctttcacttggtaggtgacatagatgtgaatgatctgccaaaggagagttgccctgtgtctggtta

SEQ ID NO: 2209 - DNA, 105 bp, Vitis vinifera
gtaaattatagagcagatttcttttggcagatggcgatcacaagccaatgtgctcaaagggcattgagtgtgtctgccaaaggagatttgctcgtgaatttaact

SEQ ID NO: 2210 - DNA, 113 bp, Vitis vinifera
atgaattgctgggcaatactccattggcagttggccactcggctgaccgcggttgacttcacaagtagcagactaagctcactgccaaaggagatttgcccctcaattcagct

SEQ ID NO: 2211 - DNA, 90 bp, Vitis vinifera
aggaataacagtgcaatcctcctttggcagaaagatcatgcacatgcatacttctgttttgccaaaggagaattgccctgccattcgctc

SEQ ID NO: 2212 - DNA, 123 bp, Zea mays; identical to SEQ ID NO: 286

SEQ ID NO: 2213 - DNA, 207 bp, Zea mays; identical to SEQ ID NO: 279

SEQ ID NO: 2214 - DNA, 124 bp, Zea mays; identical to SEQ ID NO: 287

SEQ ID NO: 2215 - DNA, 105 bp, Zea mays; identical to SEQ ID NO: 259

SEQ ID NO: 2216 - DNA, 94 bp, Zea mays; identical to SEQ ID NO: 285

SEQ ID NO: 2217 - DNA, 91 bp, Zea mays; identical to SEQ ID NO: 288

SEQ ID NO: 2218 - DNA, 175 bp, Zea mays; identical to SEQ ID NO: 281

SEQ ID NO: 2219 - DNA, 98 bp, Aquilegia caerulea
gtcgtagggcttctccctgttggcagatgataatggcttagttctttcctgatcgagtgcctttaattatctgccaaaggagagttgccctatgacta

SEQ ID NO: 2220 - DNA, 100 bp, Brachypodium distachyon
cagtgcagttctcctctggcatggatgctaatgtagcaggccctgcacaatggactatgctatcactgtccctgccaaaggagaattaccctgccagtgc

SEQ ID NO: 2221 - DNA, 168 bp, Citrus sinensis
gaagcagtaagcgatttagttgtagggcttctctcctttggcaggtgatggccaagggcaaagatcatataatatatatttatatggtgcctattctaattattgttctattttttcaatgacctgccaaaggagagttgccctataactgcttcagcttttaaataa

SEQ ID NO: 2222 - DNA, 124 bp, Gossypium hirsutum
tgagatattacagggcaaaatcttcagtggcaggcagtatatggctccattcatcaggcatcagctgtatggaaaattgcagtgtgttctccgccaatggagatttgtccggtaattccggttc

SEQ ID NO: 2223 - DNA, 128 bp, Gossypium hirsutum
tgagatattacagggcaaaatcttcagtggcaggcagccattgtatatggctccgttcatcaggcatcagctgtatggaaaattgcagtgtgttctccgccaatggagatttgtccggtaattccggt

SEQ ID NO: 2224 - DNA, 112 bp, Medicago truncatula
tcatagggcatgtctctattggtaggtgatatggtgatatttcatttgaattagaggcttcagaaattcacttgccaaaggagagctgccctgtgagtgtttagcttaaaca

SEQ ID NO: 2225 - DNA, 91 bp, Medicago truncatula
ttactgggcaatgacttctttggcagtagttgacttgatcattcagatgatgcaaacaaactcaccgccaaagaagatttgccccgcaatt

SEQ ID NO: 2226 - DNA, 92 bp, Medicago truncatula
agtcatagggcatgtctctattggcaggtgatatttcatttgacttagaggctctagaaattcacttgccaaaggagagctgccctgcgagt

SEQ ID NO: 2227 - DNA, 116 bp, Oryza sativa
gtgagaatcacagtgcagttctcctctggcatggagggcaagaggagctgaatagctaatggatgataaactgctagcctttccctgccaaaggagagctgccctgccattcagtg

SEQ ID NO: 2228 - DNA, 106 bp, Oryza sativa
agtccagtttcagggctcctctctcttggcagggagcatgtgaagtcttttgtagctcactcattttcagccctctgccaaaggagagttgccctaaaactggact

SEQ ID NO: 2229 - DNA, 132 bp, Populus trichocarpa
aaaccagttgcagggcacctctcttccttggcagacagtactaatggtgcctatagcttcaagctgagagggtatgcgagaatcttgatcccaatataggcttgccaaaggagagtttccctgtgaccgttt

SEQ ID NO: 2230 - DNA, 108 bp, Populus trichocarpa
aaaccagttgtagggtacctcttacttggcaagcaatggtgattgttgcaaacattgcagaatttgatctcggtgtcttgccaaaggagagttgccctatgactgttt

SEQ ID NO: 2231 - DNA, 94 bp, Populus trichocarpa
ggagcattgctgagcaaatttcctttggcagataccataagtaacaagagcttatgttgttcatttgccaaaggagatttgctcaccaattcca

SEQ ID NO: 2232 - DNA, 103 bp, Ricinus communis
tcgtagggcatctctcgcttggcaggcaatgatatgaagtgaagctaaattttagcattagtttgatcccaatggcttgccaaaggagagctgccctgtgact

SEQ ID NO: 2233 - DNA, 87 bp, Ricinus communis
ttactgagcaagtcttctttgacagacttccaccaagcgacatatggaaacgtggattatctgccaaaggagatttgctcactaact

SEQ ID NO: 2234 - DNA, 121 bp, Sorghum bicolor
tagctcagggtgagaatcacagtgcagctctcctctggcatgaaggctgagagagtcatgagcagttttctggcctttccctgccaaaggagagctgccctgccattcattagccctgcaa

SEQ ID NO: 2235 - DNA, 71 bp, Solanum lycopersicum
tagggctacactctattggcatgcaacttgatcaaatatttgagctgaaatgccaaaggagagttgcccta

SEQ ID NO: 2236 - DNA, 126 bp, Triticum aestivum
tcgtgtgtgaatcacagggcgcttctcccttggcacggtggcatgcatgtacatatgatggtggtagcctggtgagcgtgcggtgcagcttgctagcaagccgtgcgtgccaaaggagaattgccc

SEQ ID NO: 2237 - DNA, 136 bp, Theobroma cacao
atcactaagtgatctagttgtagggcttctctcctttggcaggttatgttcatcgaaaataaatcaagatctaattcttctattcaacaataactcgccaaaggagagttgccctgtaactgattcgacttaataa

SEQ ID NO: 2238 - DNA, 117 bp, Theobroma cacao
aagggtagagaagaataacagcgcaattctcctttggcagaaaatgttgcacttgtagaaaaagtgctatattatccgccaaaggagaattgccctgccattcaactactctacatc

SEQ ID NO: 2239 - DNA, 107 bp, Vitis vinifera
gttgcattagagggccaaatctgctttggcatgaagcccatttagcaggctcgtctgtgtctgcagtcttctcgctgccgaaggagatttgtcctgcaattcttctg

SEQ ID NO: 2240 - DNA, 122 bp, Vitis vinifera
agtagttgtagggcttctctccttctggcaggagatggcaatagattatcctttgtggcttatctccggtgttgattaacttccaatgacccgccaaaggagagttgccctgtgactacttc

SEQ ID NO: 2241 - DNA, 125 bp, Zea mays; identical to SEQ ID NO: 289

SEQ ID NO: 2242 - DNA, 74 bp, Gossypium hirsutum
agggcttctctgcattggcaggtagatgataactccacatcatgtagttaacctgccaaaggagagttggcctt

SEQ ID NO: 2243 - DNA, 129 bp, Medicago truncatula
taaagtaagcaaatcagtcatagggcatgtctctattggcaggtgatatggtgatatttcatttgactttaaggctctaaaaattcacttgccaaaggagagctgccctacgagtgtttagcttaaaca

SEQ ID NO: 2244 - DNA, 85 bp, Medicago truncatula
agtcatagggcatgtctctattggcaggtgatatagtgatatggctctagaaattcacttgccaaaggagagctgccctatgaat

SEQ ID NO: 2245 - DNA, 100 bp, Medicago truncatula
agtcatagggcatgtctctattggcaggtgatatggtgatatttcatttgactttaaggctctagaaattcacttgccaaaggagagctgccctacgagt

SEQ ID NO: 2246 - DNA, 109 bp, Populus trichocarpa
aactagttaaatggcttctcttctttggcaggtgatggtatagattacaacttatagctttaatctagtattcagttacccgccaaaggagagttgccctctaacttcc

SEQ ID NO: 2247 - DNA, 122 bp, Zea mays; identical to SEQ ID NO: 284

SEQ ID NO: 2248 - DNA, 174 bp, Medicago truncatula
gtaagcaaatcattcaaagggcatatctcctttggcaggtataatgggtggttgctagtttattttacatctatattaaaattttatgtgtttatttatcaaataaaaaataaaaaaaactatcatggtaaacaacttgccaaaggagagctgctctttgagtgtttagcttag

SEQ ID NO: 2249 - DNA, 160 bp, Brachypodium distachyon
tttggggttgggattgggggctggagcagcagcggtggaaggggcatgcagaggagcagggatgatggggggttgtactctgcttcttcccctctcgttctcctgtgcctgcctcttccattcctgctgctaccgccgtgctcggtgggcagggctgggc

SEQ ID NO: 2250 - DNA, 88 bp, Oryza sativa
agtggaaggggcatgcagaggagcaggagattcagtttgaagctggacttcacttttgcctctctctcctgtgcttgcctcttccatt

SEQ ID NO: 2251 - DNA, 84 bp, Sorghum bicolor
tggaaggggcatgcagaggagcacgaggcttggctggaagccgacctacgcctcgctggctctcctgtgcctgcctcttccatt

SEQ ID NO: 2252 - DNA, 92 bp, Saccharum ssp.
tggaaggggcatgcagaggagcacgaggcttggctaaaagccgacctgtgctatgctacccctcgctggctctcctgtgcctgcctcttcca

SEQ ID NO: 2253 - DNA, 123 bp, Zea mays
gtggaaggggcatgcagaggaggagcacgagcgaggtgtggctggaagaagcagccggggcctgtgtgctatatacccctcgcaagctctcctcactcctctcctgtgcctgcctcttccatt

SEQ ID NO: 2254 - DNA, 78 bp, Zea mays
gtggaaggggcatgcagaggagcacgaacgaggtgtggttggcccctcgttagctctcctgtgcctgcctcttccatt

SEQ ID NO: 2255 - DNA, 136 bp, Physcomitrella patens
ctagcttctccacaatttctcaccctcgttgggatcagaagagagagagcacagcccgatgtccaatgttcaggtcgaatgggctgtgctctctctcttcttgctccaacttgggtgctacacgcatctagggtac

SEQ ID NO: 2256 - DNA, 149 bp, Physcomitrella patens
ctccccttttctacattcaagccgggtttcgaagagagagagcacagccctggacttttctcatgtgaccgattttagcggtacatggtgcactgtcatcgggctgttctctctctcttctagaccctacttggatgtgtttctactgc

SEQ ID NO: 2257 - DNA, 149 bp, Physcomitrella patens
ttcagccgtactacacccaagccgggattcgaagagagagagcacagcccgtaactttcactaaagaccacttattgtggttcattggagatttgatgtcgggctgtgctctctcttttccagtccctactcggatgtgtcgccatcac

SEQ ID NO: 2258 - DNA, 151 bp, Physcomitrella patens
ttcagctttactacatccaagccaggattcgaagagagagagcacagccccgttacttttgctgaaagaatacttcctgtgatccattgggaatttgatgttgggctgtgctctctcttttccagtccctacctggatgtgctgccattgc

SEQ ID NO: 2259 - DNA, 122 bp, Physcomitrella patens
tcagcaatttactcactcatgctgggatcagaagagagagagtacagcccaagagcaaccgcttagttggaatgggctgtgctctctctcttctggttccaacctgagtgcatgtcggttgt

SEQ ID NO: 2260 - DNA, 122 bp, Physcomitrella patens
tgcacaattttctcactcatgctgggatcagaagagagagagtacagcccaacggccgatgttcagttggaacgggctgtgctctctctcttcttgttccaacctgggtgcatttccgttct

SEQ ID NO: 2261 - DNA, 107 bp, Brachypodium distachyon
cgtcaaggttaaagggagaagagagagagtacagccttaattaagctcgatcgatctgtcttgtatcaaggctgtaccctctctcttcttctcttagcttcttgatg

SEQ ID NO: 2262 - DNA, 120 bp, Festuca arundinacea
tggtcgtggctggcaccgtgggtggtggtatcccatggctgagtacttgacagaagagagagagcacagcttgagtcggcggcgacccctgtgagacacccgcctggagggagctctgga

SEQ ID NO: 2263 - DNA, 149 bp, Physcomitrella patens
tcacctttttctacattcaagctggggttcgaagagagagagcacagtcccagacttttcactcacgaccactttgagtgtcttatggtgaacagtagtcgggctgtactctctcttttccagtccctactcgaatgtgtttctatcgc

SEQ ID NO: 2264 - DNA, 126 bp, Zea mays
gagaagagagagagtacagccttgttgccatgtacacactcagatatcaacagtctcttatatttgctgttactacctgttattagtgtccagtgatgatgaaggctgtaccctctctcttcttct

SEQ ID NO: 2265 - DNA, 138 bp, Oryza sativa
atcgtgaaggctaaatggagaagagagagagtacagctttgggcggtttagttgttagatggtggaagtacttgcgacgcctactacccttttcaccaaggctgtacgctccctcttcttctcttagctttttatgat

SEQ ID NO: 2266 - DNA, 85 bp, Zea mays
agttcccttcaagcacttcacatgaggcaccattcaaataacacatttcaagattaggtgcatgtgaagtgtttgggggaactct

SEQ ID NO: 2267 - DNA, 66 bp, Zea mays
agttctatgcaagcacttcacgaggcattgtttcaagagcttttgtgaagtgtttgggggaactct

SEQ ID NO: 2268 - DNA, 70 bp, Zea mays
agttacctacaagcacgtctcgataccttggcttaataaaggccagttgtgaagtgtttgggggaactct

SEQ ID NO: 2269 - DNA, 86 bp, Oryza sativa
gagtccctaggagttcctttcaagcactttacgacacactgtattgagagttgtcgtgaagtgtttgggggaactcttagtgtcgc

SEQ ID NO: 2270 - DNA, 88 bp, Oryza sativa
gtattgtcgtgagttcccttcaagcacttcacgtggcactatctcaatgcctactatgtgaagtgtttgggggaactctcgatatcac

SEQ ID NO: 2271 - DNA, 88 bp, Oryza sativa
gtattatcgagagttcccttcaaccacttcacgtggcactgtttcaaggcctattgtgtgaagtgtttgggggaactctcgatatcac

SEQ ID NO: 2272 - DNA, 86 bp, Oryza sativa
gtatcaccgtgagttcccttcgaacacttcacgtggcactatttcaatgcctattgtgaagtgtttgggggaactctcgatgtcat

SEQ ID NO: 2273 - DNA, 112 bp, Oryza sativa
ttgttacctggagtttcctcaacacacttcacatctgctaggccctattacaattgcgcaatgtggagtctgcaattggtagtgaagtgtttgggggaactctaggtggcac

SEQ ID NO: 2274 - DNA, 99 bp, Oryza sativa
gttttaccgggagttctcttcaagcacttcacgtagagctttctattgacatggagctttagaacaatgtgaagtgtttgggggaactcttggtaccaa

SEQ ID NO: 2275 - DNA, 112 bp, Oryza sativa
gtgttcccaagagttccttgcaagcacttcacatagaacttctgttactctcatgtaacattgggaacttgagaagctactgtgaagtgtttgggggaactctaggtggcac

SEQ ID NO: 2276 - DNA, 99 bp, Oryza sativa
gttttatcgggagtttccttcaagcacttcacgtagagctttctattgatatggagctttggaacaatgtgaagtgtttgggggaactcttgataccaa

SEQ ID NO: 2277 - DNA, 94 bp, Oryza sativa
gcgttccttccaagcacttcacacagagcttttatttctctcacatcgattgagaacttaattagaagcttttgtgaagtgtttgggggaactc

SEQ ID NO: 2278 - DNA, 66 bp, Oryza sativa
gagttcccttcaagcacttcacgacgcactatttagagagttgttgtgaagtgtttgggggaactc

SEQ ID NO: 2279 - DNA, 68 bp, Oryza sativa
gagttcccttcaagcacttcacgtggcactatttcaatgcgtaccgtgtgaagtgtttgggggaactc

SEQ ID NO: 2280 - DNA, 68 bp, Oryza sativa
gagttcccttcaagcacttcacatgacactatttcaatgtctattatgtgaagtgtttgggggaactc

SEQ ID NO: 2281 - DNA, 68 bp, Oryza sativa
gagttcccttcaaccacttcacgtggcactattttaggacctactatgtgaagtgtttgggggaactc

SEQ ID NO: 2282 - DNA, 86 bp, Oryza sativa
gtatcaccgtgagttcccttcaagcacttcacgtggcactatttcaatgcctattgtgaagtgtttgggggaactctcgatgttcc

SEQ ID NO: 2283 - DNA, 110 bp, Oryza sativa
tggccccaggagttccttgcaagcacttcacatagaacttcagttactctcatacaacattgtgattttgagaagctattgtgaagtgtttgggggaactctcggtgcca

SEQ ID NO: 2284 - DNA, 150 bp, Sorghum bicolor
ggttggttggttgtcacctggagttctccacaaactacttcagtagcaacacacacccctagtttaatgcaccgtgtttgcatgtttgtgtggagctgtgtgtgtacatagtgaagtgtttgggggaactctgggtggcaatcagcaatt

SEQ ID NO: 2285 - DNA, 105 bp, Sorghum bicolor
gttaggtttggtgtccctaggagttctctgcaagcacttcacgaggcatcgttttgagagcttttgtgaagtgtttgggggaactcttagtgtcacaaatcattt

SEQ ID NO: 2286 - DNA, 73 bp, Sorghum bicolor
gagttccctacaagcacttcacgagaccttggcttaataaagggttgtttgtgaagtgtttgggggaactctt

SEQ ID NO: 2287 - DNA, 103 bp, Sorghum bicolor
tcaagtttggtgtccccaggagttctctgcaaacacttcacaaagcacttttttagagcttttgtgaagtgtttgggggaactcttggtgccactgatcattt

SEQ ID NO: 2288 - DNA, 105 bp, Sorghum bicolor
attaggtttggtgtccccgggagttctctgcaagcacttcacgaggcactattttgagagcttttgtgaagtgtttgggggaactcttgatgccactaaccattt

SEQ ID NO: 2289 - DNA, 68 bp, Sorghum bicolor
gttccctaaaagcacttcacgagaccttggcttaataaagggcccttgtgaagtgtttgggggaactc

SEQ ID NO: 2290 - DNA, 81 bp, Sorghum bicolor
gttcccttcaagcacttcacatgaggcaccattcaaactctgtttaagattaggtgtaatgtgaagtgtttgggggaactc

SEQ ID NO: 2291 - DNA, 97 bp, Sorghum bicolor
gttccctgcaaacacttcacaagctagaccatatatagtatgcccttgcacaatgtggtatccagttacctagctagtgaagtgtttgggggaactc

SEQ ID NO: 2292 - DNA, 87 bp, Sorghum bicolor
gttcccttcaagcacttcacatgaagctctttgcattatattggcggatgtagcattgagaccaatgtgaagtgtttgggggaactc

SEQ ID NO: 2293 - DNA, 77 bp, Triticum aestivum
cttacagtgggttccttgcaagcacttcatgaggcattattaaaaatgccactgtgaagtgtttgggggaactcttg

SEQ ID NO: 2294 - DNA, 149 bp, Zea mays
tattggttggttgtcacctggagttctcctcaaaccacttcagttgctgcacctagctagtttaatggcactgtgcttgcgtgcaagcggccggagctgtgtgtagctagtgaagtgtttgggggaactctgggtgtcaatcagcaatt

SEQ ID NO: 2295 - DNA, 114 bp, Zea mays
gcaacgttttgtgttactaggagttccctacaagcacttcacaataccttggctcaataaattaaaggccagttgtgaagtgtttgggggaactcttggtatcatgaagcattt

SEQ ID NO: 2296 - DNA, 66 bp, Zea mays; identical to SEQ ID NO: 2267

SEQ ID NO: 2297 - DNA, 85 bp, Zea mays; identical to SEQ ID NO: 2266

SEQ ID NO: 2298 - DNA, 70 bp, Zea mays
agttccctacaagcacttcacgataccttggcttaataaaggccagttgtgaagtgtttgggggaactct

SEQ ID NO: 2299 - DNA, 85 bp, Zea mays; identical to SEQ ID NO: 2266

SEQ ID NO: 2300 - DNA, 66 bp, Zea mays
agttctctacaagcacttcacgaggcttcgtactgagagcttttgtgaagtgtttgggggaactct

SEQ ID NO: 2301 - DNA, 89 bp, Zea mays
agttcccttcaagcacttcacatgaggcaccattcaaatgacaactccatttaagattatgtgtaatgtgaagtgtttgggggaactct

SEQ ID NO: 2302 - DNA, 140 bp, Arabidopsis lyrata
acaaaatataattcgactagatgtcctctagagttctcccgaacacttcattggaaatttgttattcggtaaactaccaattaattccactgaagtgtttgggggaactccggatgtcatttggtgatgtcaagccatgt

SEQ ID NO: 2303 - DNA, 105 bp, Arabidopsis lyrata
gtcggatgtttcctagagttcctctgagcacttcattggagataccatcttttatcaaatggttttctactgaagtgtttgggggaactcccggactcattcgat

SEQ ID NO: 2304 - DNA, 105 bp, Arabidopsis lyrata
gtcggatgttccctagagttcctctgagcacttcattggagataccattgtctatgaaatagtattctactgaagtgtttgggggaactcctggactcattcgat

SEQ ID NO: 2305 - DNA, 93 bp, Arabidopsis thaliana
atgtctcctagagttcctctgagcacttcattggggatacaatttttctaaatgattatccactgaagtgtttgggggaactcccggacccat

SEQ ID NO: 2306 - DNA, 100 bp, Arabidopsis thaliana
atgtcctctagagttctcctgaacacttcattggaaatttgttattcagtaagctaacagttaattccactgaagtgtttgggggaactcccgatgtcat

SEQ ID NO: 2307 - DNA, 95 bp, Arabidopsis thaliana
atgttttctagagttcctctgagcacttcattggagatacaattttttataaaatagttttctactgaagtgtttgggggaactcccgggctgat

SEQ ID NO: 2308 - DNA, 181 bp, Brachypodium distachyon
caggagatgaatggttggttgtcaactggagttctcctcaaatcacttcagtagctagctagctagcttgtgcctcattgtttcattgccgctgtttataagtgtgcatggagctggagagccgtgcacagtgaagtgtttgggggaactccgggtggcaaccaacaatactgatatcacc

SEQ ID NO: 2309 - DNA, 238 bp, Brachypodium distachyon
acttcacaagaagctattcctagggctattgtgaagtgtttgggggaactcttgatgtcaccaagcttccatttgtagatgtttctctcaagccaaaagagatacatcagccggcatcggaccacgtttggtattaccatgagttccctgcaagcacttcacgaggcccaattatgatggctactgtgaagtgtttgggggaactcttggtgtcaccaagcttacacaaataaaaaga

SEQ ID NO: 2310 - DNA, 126 bp, Brachypodium distachyon
ggcggcagaccacgtttggtaataccatgagttccctgcaagcacttcatgaggcctaattctaagggctactgtgaagtgtttgggggaactcttggtgttaccaagcttttacaacaaaaggag

SEQ ID NO: 2311 - DNA, 150 bp, Brachypodium distachyon
gttggttgtcacctggagttctcctcaaatcacttcagtagctagctagcttgtgcctccttgttgcattgccactgttttataagtgtgcttggggccagagagctgtgcacagtgaagtgtttgggggaactctgggtggcaaccagc

SEQ ID NO: 2312 - DNA, 96 bp, Brachypodium distachyon
gtttggtgtccccgggagttcccttcaaacactttacgaagcatctttctaagactatttgtgaagtgtttgggggaactctcggtgtcaccaagc

SEQ ID NO: 2313 - DNA, 89 bp, Brachypodium distachyon
ggtgttaccaggagtttcctgcaaacacttcacgagtgcctattttaatgggttgttgtgaagtgtttgggggaactcttgatgtcacc

SEQ ID NO: 2314 - DNA, 76 bp, Brachypodium distachyon
accatgagttccctgcaagcacttcacgaggccgttttctgagggctactgtgaagtgtttgggggaactcttggt

SEQ ID NO: 2315 - DNA, 90 bp, Brachypodium distachyon
tggtattatcatgaattccctacaagcacttcacaagaagctattcctagggctattgtgaagtgtttgggggaactcttgatgtcacca

SEQ ID NO: 2316 - DNA, 88 bp, Brachypodium distachyon
ggtattctcatgagtttcccgcaagcacttcacgaggccgttttctgagggctactgtgaagtgtttgggggaactcttggtctcacc

SEQ ID NO: 2317 - DNA, 86 bp, Brachypodium distachyon
gtactaccatgagttccctgcaagcacttcatgaggcccaattctgagggctactgtgaagtgtttgggggaactcttggtgttac

SEQ ID NO: 2318 - DNA, 96 bp, Brachypodium distachyon
gtttggtattatcatgagttccctgcaagcacttcacgaggcactatcccaagggctactgtgaagtgtttgggggaactcttggtgtcaccaagc

SEQ ID NO: 2319 - DNA, 95 bp, Brachypodium distachyon
tggtattaccatgagttcctttgcaagcatttcacgtacgaggcactatcccaagggctattgtgaagtgtttgggggaactcttggtgtcacca

SEQ ID NO: 2320 - DNA, 90 bp, Brachypodium distachyon
tggtattaccatgagttccctgcaagcacttcaccatgcactaccccaagggctattgtgaagtgtttgggggaactcttggtgtcacca

SEQ ID NO: 2321 - DNA, 101 bp, Citrus sinensis
atgtctccgggagttcctccgatcacttcattggggctatatgatcatttagacaaaatttgtcaccccactgaagtgtttgggggaactctgggtgccac

SEQ ID NO: 2322 - DNA, 107 bp, Gossypium hirsutum
gagttcccctgatcacttcactggggttatggggtctgctcttctcttctcagagccttgttaaaagggaggtctccgatgacctactgaagtgtttgggggaactc

SEQ ID NO: 2323 - DNA, 67 bp, Glycine max
gagttcctctgaacgcttcatgtgattggctagttataggcctttgatgaagtgtttgggggaactc

SEQ ID NO: 2324 - DNA, 135 bp, Medicago truncatula
tttttgttgattgtttcttagagttcctttgaacgcttcatgcatgagaatatgtatttggtctaatatccattagaaaagatagttcttcatcaatgaagtgtttgggggaactcttgggttcaaccagcacca

SEQ ID NO: 2325 - DNA, 97 bp, Medicago truncatula; identical to SEQ ID NO: 263

SEQ ID NO: 2326 - DNA, 95 bp, Medicago truncatula
gagttcctttgaacgcttcatgcatgagaatatctatttggtctaaaatccattagaaaaatagttcttcttaaatgaagtgtttgggggaactc

SEQ ID NO: 2327 - DNA, 100 bp, Medicago truncatula
gagttcctttgaacgcttcatgcatgagaatatctatctatttggtttaaaatccattaggatagatagttcttcttaaatgaagtgtttgggggaactc

SEQ ID NO: 2328 - DNA, 98 bp, Medicago truncatula
gagttcctttgaacgcttcatgcatgagaaatatctctttggtttaaaatccattagaaaagatagtattttcttctatgaagtgtttgggggaactc

SEQ ID NO: 2329 - DNA, 63 bp, Medicago truncatula
gagttcctctgaacgcttcatataagaggttatccatcttcattgaagtgtttgggggaactc

SEQ ID NO: 2330 - DNA, 76 bp, Medicago truncatula
gagttcctctgaatgcttcaatcatgagacaatctatatgaatagttcttgttcaatgaagtgtttgggggaactc

SEQ ID NO: 2331 - DNA, 76 bp, Medicago truncatula
gagttcctctgaatgcttcaaacatgagacaatctatatggatagttcttgttcaatgaagtgtttgggggaactc

SEQ ID NO: 2332 - DNA, 98 bp, Medicago truncatula; identical to SEQ ID NO: 2328

SEQ ID NO: 2333 - DNA, 101 bp, Medicago truncatula
gagttcctttgaacgcttcatgcatgagaatatctatctatttggtctaaagtccattagaaaagatagccattttttcaatgaagtgtttgggggaactc

SEQ ID NO: 2334 - DNA, 100 bp, Medicago truncatula
gagttcctttgaacgcttcatgcatgagaatatctatctatttggtctaaaatccattagaaaagatagttcttcttaaatgaagtgtttgggggaactc

SEQ ID NO: 2335 - DNA, 101 bp, Medicago truncatula; identical to SEQ ID NO: 2333

SEQ ID NO: 2336 - DNA, 83 bp, Medicago truncatula
gagttcctctgaactcttcatctaaagggctatagcaagaaagaaaggaaaatccttgtatgatgaagtgtttgggggaactc

SEQ ID NO: 2337 - DNA, 105 bp, Medicago truncatula
tcttagagttcctttgaacgcttcatgcatgagaatatctatttggtctaaaatccattagaaaaatagttcttcttaaatgaagtgtttgggggaactcttggg

SEQ ID NO: 2338 - DNA, 111 bp, Medicago truncatula
tcttagagttcctttgaacgcttcatgcatgagaatatctatctatttggtctaaagtccattagaaaagatagccattttttcaatgaagtgtttgggggaactcttgga

SEQ ID NO: 2339 - DNA, 142 bp, Oryza sativa
ttgtccactggagttctcctcaatccacttcagtagatagctatggctaggcctcattgcattgcactgttacataactgtgatcatggggccaaaagctagctatgtatagtgaagtgcttgggggaactccagttgacac

SEQ ID NO: 2340 - DNA, 89 bp, Oryza sativa
gtattatcaagagttctctttaagcacttcatacgacaccattatttatagggttgttgtgaagtgtttggaggaactctcggtgtcat

SEQ ID NO: 2341 - DNA, 82 bp, Oryza sativa
ttatcgcgggttcccttcaatcacttcacatggtactatttcaaggcctactatgtgaattgtttgggggaactctcgatgt

SEQ ID NO: 2342 - DNA, 143 bp, Oryza sativa
ttatccactggagttctcctcaaaccacttcagcagatagctagctaggcctcattgcattgcaccactgttgcataactatgagcatggggccaaaagttagctgcttatagtgaagtgtttggggaaactccggttggcaa

SEQ ID NO: 2343 - DNA, 98 bp, Populus trichocarpa
gtgtcccctagagttcccttgagcacttcactgggacccttcagaccgaaagagtattatctttcccactgaagtgtttgggggaactcctggtgtca

SEQ ID NO: 2344 - DNA, 101 bp, Populus trichocarpa
gtgtcccctagagttcctctgagcacttcattgggaatcttcgattaaatgaaagagtattatcattcctactgaagtgtttgggggaactcctggtgtca

SEQ ID NO: 2345 - DNA, 101 bp, Populus trichocarpa
gtgtcccctagagttcctctgagcacttcactgggaatttccgatcaaatgaaagagtattatcattcctactgaagtgtttgggggaactcctggtgtca

SEQ ID NO: 2346 - DNA, 113 bp, Populus trichocarpa
ctgtcccccggagtttccctgaccacttcactggggctataattctactcttcgtgtttaagggtagaggcaacccttcctcactgaagtgtttgggggaactctgggtggca

SEQ ID NO: 2347 - DNA, 113 bp, Populus trichocarpa
ctgtcccccggagtttccctgaccacttcactggggctataattctactcctcgtgtttaagggtagaggcaacccttcctcactgaagtgtttgggggaactctgggaggca

SEQ ID NO: 2348 - DNA, 102 bp, Populus trichocarpa
gtgtcccctagagttcctctgagcacttcattggggatcttccatcgacctgaaagagtattatcattcctactgaagtgtttgggggaactcctggtgtca

SEQ ID NO: 2349 - DNA, 102 bp, Populus trichocarpa; identical to SEQ ID NO: 2348

SEQ ID NO: 2350 - DNA, 102 bp, Populus trichocarpa
gtgtcccctagagttcctctgagcacttcaatggggatcttccatcgacctgaaagagtattatcattcctactgaagtgtttgggggaactcctggtgtca

SEQ ID NO: 2351 - DNA, 102 bp, Populus trichocarpa; identical to SEQ ID NO: 2350

SEQ ID NO: 2352 - DNA, 74 bp, Ricinus communis
ctagagttcccttgaacacttcactgggacgaaaatccattcttccaactgaagtgtttgggggaactcttggt

SEQ ID NO: 2353 - DNA, 97 bp, Ricinus communis
ctggagttcccctggccgcttcattggggctattatatacccttaattatacatgtgttattcctgccctactgaagtgtttgggggaactctaggt

SEQ ID NO: 2354 - DNA, 82 bp, Ricinus communis
ctagagttcccttgagcacttcactgggatgaaaaaaggtccagtcttccttcctactgaagtgtttgggggaactcctggt

SEQ ID NO: 2355 - DNA, 87 bp, Ricinus communis
ctagagttcccttgaccacttcattgtggattattcttcaagctcaaggagttggtttacactgaagtgtttgggggaactcctggt

SEQ ID NO: 2356 - DNA, 74 bp, Ricinus communis; identical to SEQ ID NO: 2352

SEQ ID NO: 2357 - DNA, 122 bp, Sorghum bicolor
acaatgtttggtgttaccacgagttcccttcaagcacttcatgaggcaccattaaataactctatttaagattaggtgtaatatgaagtgtttgggggaactcttggtgatactcaacatcg

SEQ ID NO: 2358 - DNA, 80 bp, Sorghum bicolor
gttcccttcaagcacttcacatgaagcttcacattggcagatgtagtcttgagaccaatgtgaagtgtttggaggaactc

SEQ ID NO: 2359 - DNA, 84 bp, Sorghum bicolor
gttcccttcaagcacttcacatggagcattatttgtcttggagaaagcttaatttgatgcattgtgaagtgcttgggggaactc

SEQ ID NO: 2360 - DNA, 94 bp, Solanum demissum
atgttccctagagttcccttgaccgcttcattagggttaactactttgttgtttgatgccctgctgaagtgtttgggggaactcccgggctcac

SEQ ID NO: 2361 - DNA, 199 bp, Solanum lycopersicum
agggcttactttgatgttggaagccttgctgaagtgtttgggggaactcccgggttgactttgaaaattacgcaaacaagtatatataaatgcatgagtacgtattagctaaagatgatgagtacaatattgattcatgtacctttggagttcccttgaccacttcatgagagcttaatatttgattgtttgaagtcct

SEQ ID NO: 2362 - DNA, 101 bp, Solanum lycopersicum
ttaaggtgttccctagagttcccttgaccacttcatgagggcttactttgatgttagaagcgttgctgaagtgtttgggggaactcctgggttgactttaa

SEQ ID NO: 2363 - DNA, 124 bp, Triticum aestivum
ctgaagtgtttgggggaactcttggtgtcaccaagcatttagtagacattggccacatatcataagagagatgcatcaatgggctgaatgtttggtcttaccatgggttccttgcaagcacttc

SEQ ID NO: 2364 - DNA, 123 bp, Theobroma cacao
agagagtcagctgtcctctggagttcccctgaccacttcactagaggtttcctggacccttaataggaagaaacctgacctactgaagtgtttgggggaactcctgttggcacctgacaatgt

SEQ ID NO: 2365 - DNA, 117 bp, Theobroma cacao
tatgccaggtgcccactagagttcccctgggcacttcagttgatttctttagagctcaaaacctcttacctgtctactgaagtgtttgggggaactccggttgccatctgagacagt

SEQ ID NO: 2366 - DNA, 92 bp, Vitis vinifera
gtcccctagagttcccttgatcacttcactagggagcttcgctagttttaatgacttcctactgaagtgtttgggggaactcctggtaccga

SEQ ID NO: 2367 - DNA, 90 bp, Vitis vinifera
gtcccctagagttccccttaccacttcactggggatcttctctaatgaatgcctacgtactgaagtgtttgggggaactcctggtgccat

SEQ ID NO: 2368 - DNA, 92 bp, Vitis vinifera
gtcccctagagttcccttgaccacttcactggggaccttctctagttataatgacttcctactgaagtgtttgggggaactcctggtgccat

SEQ ID NO: 2369 - DNA, 86 bp, Vitis vinifera
gccccctagagttcccctgaccacttcattggggatcttctctaatgacttcctactgaagtgtttgggggaactcctggtgtcat

SEQ ID NO: 2370 - DNA, 92 bp, Vitis vinifera
ctcccctagagttcccttgaccacttcactggggaccttctctaattataatgacttcctactgaagtgtttgggggaactcctggtgccat

SEQ ID NO: 2371 - DNA, 86 bp, Vitis vinifera
gtaccctagagttcccctgaccacttcactggggatcttctctaatgacttcccactgaagtgtttgggggaactcctggtgtcat

SEQ ID NO: 2372 - DNA, 86 bp, Vitis vinifera
gtcccctagagttcccctgagcacttcattggggatccttagttttcaattcctactgaagtgtttgggggaactcccggtgtcat

SEQ ID NO: 2373 - DNA, 92 bp, Vitis vinifera
gtcccctagagttcccttgaccacttcactggggaccttctctaattataatgacttcctactgaagtgtttgggggaactcctggtgctat

SEQ ID NO: 2374 - DNA, 86 bp, Vitis vinifera
gccccctagagttcccctgaccacttcactggggatcttctgtaatgacttcctactgaagtgtttgggggaactcctggtgtcat

SEQ ID NO: 2375 - DNA, 86 bp, Vitis vinifera
gccccctagagttcccctgaccacttcactggggatcttctttaatgacttcctactgaagtgtttgggggaactcctggtgtcat

SEQ ID NO: 2376 - DNA, 92 bp, Vitis vinifera
tcccctagagttcccttgaccacttcactggggaccttctctaattataatgacttcctactgaagtgtttgggggaactcctggtgccatt

SEQ ID NO: 2377 - DNA, 87 bp, Vitis vinifera
gccccctagagttcccctgaccacttcactgggggatcttctgtaatgacttcctactgaagtgtttgggggaactcctggtgtcat

SEQ ID NO: 2378 - DNA, 92 bp, Vitis vinifera
gtcccctagagttcccttgaacacttcactggggaccttctctagttataatgacttcctactgaagtgtttgggggaactcctggtgccat

SEQ ID NO: 2379 - DNA, 138 bp, Zea mays
tcttggttggttctcccttggagttccctgcaaacacttcaccagctaggccatagtgccggcccttgcacaatgttgtatctgatcacctagctagtgtgaagtgtttggaggaactctaggtgttatccagcaatg

SEQ ID NO: 2380 - DNA, 81 bp, Zea mays
agttccttccaaacacttcaccagctaggccatgcacaagatgaacccacattaggctagtgaagtgtttggaggaactct

SEQ ID NO: 2381 - DNA, 82 bp, Zea mays
agttcctttcaaacacttcacatggagcttctcattggtggatatattcttgagacccgtgtgaagtgtttggaggaactct

SEQ ID NO: 2382 - DNA, 226 bp, Zea mays
agttctcttcaagcacttcacgaggcatcacactgagagcttttgtgaagtgtttgggggaactcttggtgtcacaaatcatttgcatttgcttgatgttagtcatgcaccatgtgatatgagataaaggacatggcaacgttttgtgttactaggagttccctacaagcacttcatgagaccttgacttaataaagggccattgtgaagtgtttgggtgaactct

SEQ ID NO: 2383 - DNA, 111 bp, Arabidopsis lyrata
gccaaatgtccccatgagttccctttaacgcttcattgttaaatactcaaagccacattggtttgtatataacactgaagtgtttggggggactcttggtgccattttggc

SEQ ID NO: 2384 - DNA, 127 bp, Arabidopsis lyrata
gtcaaatgtctccttgagttcccttaaacgctttattgttcacactttgttgtctaagatcaatcgatcgattcaatcaatctgacgaacactgaagtgtttggggggactctaggtgacatatggc

SEQ ID NO: 2385 - DNA, 135 bp, Arabidopsis lyrata
gtcaactgtccccttgagttcccttaaacgcttcattgttcatactttgtgagtttgtgttctaagatctatcgaccgataaatcaatctgatgaacactgaagtgtttggggggactctaggtgacatcttggc

SEQ ID NO: 2386 - DNA, 93 bp, Arabidopsis lyrata
ctcaagagttcctccgaacacttcattgaaaaaaggttctccattttcgtaatttttttttactgaagtgtttggaggaactccagatgatat

SEQ ID NO: 2387 - DNA, 100 bp, Arabidopsis thaliana
atgtccccatgagttccctttaacgcttcattgttaaatactcaaagccacattggtttgtatacaacactgaagtgtttggggggactcttggtgtcat

SEQ ID NO: 2388 - DNA, 100 bp, Arabidopsis thaliana
atgtccacatgagttccctttaacgcttcattgttgaatactcaaagccacattggtttgtatataacactgaagtgtttggggggactcttggtgtcat

SEQ ID NO: 2389 - DNA, 112 bp, Arabidopsis thaliana
atgtccccttgagttcccttaaacgcttcattgttcatactttgttatcatctatcgatcgatcaatcaatctgatgaacactgaagtgtttggggggactctaggtgacat

SEQ ID NO: 2390 - DNA, 186 bp, Gossypium hirsutum
ctttttcctcgaacaactgtaacggaacgggtgagacggagaagggaaaggtggtgtccatttgaagcgaaatcggatcatccgcaatggaggatttagtaaaacccagggacagacccgatttagtatgaaataaatccattgaaaccctaaaagggaaattttttgaagtgtttgggggaactt

SEQ ID NO: 2391 - DNA, 124 bp, Medicago truncatula
tacttgttgattttctcttggagttcctctgaatgcttcaaacatgagacaatcttgatagaaattatggatagttcttgttcaatgaagtatttgggggaactcttggaattgaatcaacata

SEQ ID NO: 2392 - DNA, 101 bp, Medicago truncatula
gactttctctgaacacttcatacaagaggttatccatctaatctaaaagtcattagatatttacgatgggtcgttcttcaatgaagtgtttgggggaactt

SEQ ID NO: 2393 - DNA, 72 bp, Medicago truncatula
gagttcccttaaacatttcattaaggactcaatttcttctcttcaaccttgttgaagcgtttgggggaactc

SEQ ID NO: 2394 - DNA, 142 bp, Oryza sativa; identical to SEQ ID NO: 2339

SEQ ID NO: 2395 - DNA, 69 bp, Oryza sativa
gagttctctttaagcacttcatacgacaccattattgttagggttgttatgaagtgtttggaggaactc

SEQ ID NO: 2396 - DNA, 86 bp, Oryza sativa
acactgccaggaattcccttcaagcaattcatgaaacaatattttgagagttgttgtgaagcgtttgggggaaatctcagtgtcgc

SEQ ID NO: 2397 - DNA, 69 bp, Oryza sativa
gaattctctttaagcacttcatacgacacaattatttcaagggttgttgtgaagtatttggcggaactc

SEQ ID NO: 2398 - DNA, 84 bp, Zea mays
agtttccttcaagcacttcacatggagcattctgtcttagagaaagcttaatttattgcattgtgaagtgtttgaggaaactct

SEQ ID NO: 2399 - DNA, 166 bp, Arabidopsis lyrata
atgacagagctacaagaagaaagtcaaatgtcttcatgagttccctttaacgcttcattgttaatattcaaactacatttatttccataaatgtttgatcgatttgtatataacactgaagtgtttggggggacttttggtgtcattctggcgtagttacgattat

SEQ ID NO: 2400 - DNA, 100 bp, Aquilegia caerulea
tggagttcctcctgccgcttcagtaatgatctattaattcctagctagttaactagtttttgacaatcttaattactgaagggtttggaggaactctaag

SEQ ID NO: 2401 - DNA, 80 bp, Aquilegia caerulea
cctggagtttctcctgccgcttcaggaacgatcaattgcaaaatttgttattactgaagggtttggaggaactctgggtg

SEQ ID NO: 2402 - DNA, 84 bp, Gossypium hirsutum
gagttcccctgaccacttcattggggatatattaaaaaccttaactgaggaaattttttcctactaaagtgtttaggggaactc

SEQ ID NO: 2403 - DNA, 96 bp, Oryza sativa
atttggtatcgccatgagttctcttcaaactcttcatacgacactaattcaagtgatgttgtgaagtgtttggagtagctcttggtgtcaccaaac

SEQ ID NO: 2404 - DNA, 103 bp, Picea abies
ctcacagctggttctcaatgccgggagttccttcaatcacttcgccgaatccgaaagcatttcactgaagtgtttggaggaacttcgggcgtcactgaactgc

SEQ ID NO: 2405 - DNA, 226 bp, Populus trichocarpa
ggtcaccctgagttcctcctagcttcttcagtacccgtggaaagctaatgctacaattatcttgagctggtaagactggcaggtgtcagatgtggatgtgttaaaggtaatattattgattatttacggcgccattcaagtatttgttctactgttagaggatttaatcaagtatatgtggtattactcctgatttgctgaagggtttggaggaactctaggtgct

SEQ ID NO: 2406 - DNA, 148 bp, Brachypodium distachyon
agctcctggacgaacggttggttgtttcctggggttccctccaaacacttcagcaggtcggctttcctatactagctcacaggctgaagggtgaagtgtttggggaactctaggtgacaaccgccattttatcaaggtcaaactgctg

SEQ ID NO: 2407 - DNA, 69 bp, Oryza sativa
gagttctctttaatcatttcacatggcactattttaaggcctactgtgtgaagtgtttgggggattctc

SEQ ID NO: 2408 - DNA, 137 bp, Vitis vinifera
ggccttgagagttcccccaacccctccagtatgaccatctctcttcttcttttaatttgttcatcaaatcttcttctactatctatttccagggtgatttcctctactgaagagtctggaggaactcttggtgccac

SEQ ID NO: 2409 - DNA, 178 bp, Physcomitrella patens
aattttgaaaccttcttttgcttcatattctagtcgttggtttatggtgcctaagaaaaatggatcgttatgttttattcaagatatacagccaatgaatgtagtaactataagaaatgcaggtataggatctttaatagatgagtttgctgaagcgtttgggggaagggcaatttat

SEQ ID NO: 2410 - DNA, 140 bp, Zea mays; identical to SEQ ID NO: 310

SEQ ID NO: 2411 - DNA, 109 bp, Sorghum bicolor; identical to SEQ ID NO: 320

SEQ ID NO: 2412 - DNA, 120 bp, Triticum aestivum; identical to SEQ ID NO: 321

SEQ ID NO: 2413 - DNA, 108 bp, Zea mays; identical to SEQ ID NO: 270

SEQ ID NO: 2414 - DNA, 108 bp, Zea mays
cgggggcggactgggaacacatgggaatgagatgagatcattgctcggtcgtgctggcctgggccgtcggcgcgcgttgatcttgcatgtgttctcaggtcgcccccg

SEQ ID NO: 2415 - DNA, 93 bp, Aquilegia caerulea; identical to SEQ ID NO: 311

SEQ ID NO: 2416 - DNA, 150 bp, Brachypodium distachyon; identical to SEQ ID NO: 312

SEQ ID NO: 2417 - DNA, 131 bp, Brachypodium distachyon; identical to SEQ ID NO: 313

SEQ ID NO: 2418 - DNA, 87 bp, Medicago truncatula; identical to SEQ ID NO: 314

SEQ ID NO: 2419 - DNA, 87 bp, Medicago truncatula; identical to SEQ ID NO: 315

SEQ ID NO: 2420 - DNA, 88 bp, Oryza sativa; identical to SEQ ID NO: 316

SEQ ID NO: 2421 - DNA, 85 bp, Populus trichocarpa; identical to SEQ ID NO: 317

SEQ ID NO: 2422 - DNA, 97 bp, Populus trichocarpa; identical to SEQ ID NO: 318

SEQ ID NO: 2423 - DNA, 126 bp, Ricinus communis; identical to SEQ ID NO: 319

SEQ ID NO: 2424 - DNA, 125 bp, Theobroma cacao; identical to SEQ ID NO: 322

SEQ ID NO: 2425 - DNA, 88 bp, Vitis vinifera; identical to SEQ ID NO: 323

SEQ ID NO: 2426 - DNA, 88 bp, Vitis vinifera; identical to SEQ ID NO: 324

SEQ ID NO: 2427 - DNA, 98 bp, Medicago truncatula
tctcagaggagtgacactgagaacacaagattgattaatcatataatgtatttggttgttactagttgattttgtgttctcaggtcacccctttgagt

SEQ ID NO: 2428 - DNA, 142 bp, Arabidopsis lyrata; identical to SEQ ID NO: 1840

SEQ ID NO: 2429 - DNA, 132 bp, Arabidopsis lyrata; identical to SEQ ID NO: 1838

SEQ ID NO: 2430 - DNA, 116 bp, Arabidopsis thaliana
tggatctcgacagggttgatatgagaacacacgagtaatcaacggctgtaatgacgctacgtcattgttacagctctcgttttcatgtgttctcaggtcacccctgctgagctctt

SEQ ID NO: 2431 - DNA, 115 bp, Arabidopsis thaliana
tggatctcgacagggttgatatgagaacacacgagcaatcaacggctataacgacgctacgtcattgttacagctctcgtttcatgtgttctcaggtcacccctgctgagctctt

SEQ ID NO: 2432 - DNA, 153 bp, Arachis hypogaea
tatctcagaggagtgaacctgagaacacaaagtaaattgtttcggagtttggaatgccataatcacatgcataatgcatttatgcttatgcttgtatatggtacatattttcgaattttaatttaccttgtgttctcaggtcacccctttgag

SEQ ID NO: 2433 - DNA, 182 bp, Arabidopsis lyrata; identical to SEQ ID NO: 1841

SEQ ID NO: 2434 - DNA, 92 bp, Aquilegia caerulea
cctggaggagtggcactaagaacacaggtggttgtgcgatttcgaatatcattgcattttgcatttgtgttctcaggtcacccctttgggga

SEQ ID NO: 2435 - DNA, 105 bp, Arabidopsis thaliana
tgaaatttcaaaggagtggcatgtgaacacatatcctatggtttcttcaaatttccattgaaaccattgagttttgtgttctcaggtcacccctttgaatctccc

SEQ ID NO: 2436 - DNA, 95 bp, Brassica oleracea
tctcaaaggagtgtcatgagaacacggatcctcttgtttctttaagatttccactgaaaccattgagtattgtgttctcaggtcacccctttgaa

SEQ ID NO: 2437 - DNA, 225 bp, Citrus sinensis
caacagatgtgaaaccccagaggagtgatcctgagaacagagggtggcgttggcttaaatttgatttgcattgctgctgcctgctcctgccatacattaaatcaaaaagattgtatgtggccaacgcaccttgtgttctcaggtcacccctttgggaattcaattgtcaatcagcacgtgtcatcaagttactcaattgctctaacattcgctgcttctgattca

SEQ ID NO: 2438 - DNA, 106 bp, Gossypium hirsutum
gccaagatggtttaccccagaggggtgccacctaagaacacaggtcatcccttaaccaaatagcttgtgttctcaggtcacccctttggggtacatatatcttcgc

SEQ ID NO: 2439 - DNA, 116 bp, Glycine max
ctcggaggagtgaatctgagaacacaaggctggtttgcactgctatatcatctattggtataaggtgaatttactttgtgttctcaggtcacccctttgagccaacctgttgacat

SEQ ID NO: 2440 - DNA, 135 bp, Glycine max
agtccaaatggtttatctcagaggagtggatctgagaacacaaggctggtttgcactgctatattatgatcgattggtataaggtgaatttactttgtgttctcaggtcacccctttgagccaacctgttgacat

SEQ ID NO: 2441 - DNA, 123 bp, Gossypium raimondii
gccaagatggtttaccccagaggggtgccacctaagaacacaggtcatcccttaaccaaatagcttgtgttctcaggtcacccctttggggtacatatatcttcgccattcccttttgtttgc

SEQ ID NO: 2442 - DNA, 115 bp, Oryza sativa
gctgaacccagaggagtggtactgagaacacaggtgccaatacaatgtatggtgagctactgtataatggagtaattctgtaactgtgttctcaggtcacccctttgggtttctt

SEQ ID NO: 2443 - DNA, 109 bp, Populus trichocarpa
gtacaccccagaggagtggctccagagaacacagggggttggttttctagctgtaagctacaagatggacaaagcactctgtgttctcaggtcacccctttggggcacc

SEQ ID NO: 2444 - DNA, 91 bp, Ricinus communis
ccagaggagtggctccctgagaacacacgtgcattggctctcaccttttgtagttccactgcacctgtgttctcaggtcacccctttgggg

SEQ ID NO: 2445 - DNA, 165 bp, Theobroma cacao
cagccagatggtttaccacgaaggggtgccacctaagaacccaggcggtttggcctgagctaggcctttgccaagctgctatgaaaaggaaggctgaatgctaatgcagccagcagcaaccggttgtgttctcaggtcaccccttcgcggtacttctatcttcgc

SEQ ID NO: 2446 - DNA, 103 bp, Vitis vinifera
acaccccaagggagtggcacctgagaacaccggttgtgttggctgcgccaagctctgctagctaatgcattttgtgttctcaggtcacccctttggggcacca

SEQ ID NO: 2447 - DNA, 124 bp, Pinus taeda
agcagaggaggtttccaccggggcgacctgggaacacgtctacattaatgtaatctcttgatttctccatgagtcctgtgaatgtgaatgtgttccaaggtcaccccagtcgagcctactctct

SEQ ID NO: 2448 - DNA, 84 bp, Zea mays
atcattgagcgcagcgttgatgagccagccgccgtgcctcccctgtcggctgcggcggctcaccagcgctgcactcaattacgc

SEQ ID NO: 2449 - DNA, 126 bp, Arabidopsis lyrata
tcctggatttgaatgaacatcattgagtgcagcgttgatgtaatttcctttttttttcattgttgaatggaattaaaagaatttacaccggcgttgcgctcaattatgtttttcttattttcagga

SEQ ID NO: 2450 - DNA, 131 bp, Arabidopsis lyrata
cctgggtttgaataaacatcattgagtgcagcgttgatgtaagtttacttattttattccattgttgaatgaattaaaatgatacagaatacatcagcgttgcattcaattatgtttttctaattttcagg

SEQ ID NO: 2451 - DNA, 107 bp, Arabidopsis thaliana
tgaatgaacatcattgagtgcagcgttgatgtaatttcgttttgtttttcattgttgaatggattaaaagaatttataccagcgttgcgctcaattatgtttttcta

SEQ ID NO: 2452 - DNA, 124 bp, Brachypodium distachyon
gaagaggcgcaaaggcatcattgagtgcagcgttgatgaacaggggccaggcgaccggcggccggtccggttcggttcaccggcgctgcacacagtgacgcccttgcattctctggcccgattc

SEQ ID NO: 2453 - DNA, 124 bp, Brachypodium distachyon; identical to SEQ ID NO: 2452

SEQ ID NO: 2454 - DNA, 96 bp, Brassica napus
gaacatcattgagtgcagcgttgatgtgatttacttctctttttcattgttgaatggattaaagcaatttacatcaacgttggctcaattatgttt

SEQ ID NO: 2455 - DNA, 96 bp, Brassica napus
gaacatcattgagtgcagcgttgatgtgatttacttatctttttcattgttgaatggattaaagcaatttacatcaacgttggctcaattatgttt

SEQ ID NO: 2456 - DNA, 156 bp, Citrus sinensis
ccagattgaaaaaaacatcattgagtgcagcgttgatgaatatttgtcggtgctttgccaatatttctctatactagccaggattctttcaccagcgctgcactcgatcatgttttttagctctgctggttcaggattatccagataatacgcaca

SEQ ID NO: 2457 - DNA, 114 bp, Oryza sativa
atcaaatgcatcattgagtgcagcgttgatgaacaacggtaaccggtccatgttgatgcgcatttggccggtgatctgatcatcatcagcgcttcactcaatcatgcgtttggc

SEQ ID NO: 2458 - DNA, 120 bp, Populus trichocarpa
tggagaaccatcattgagtgcagcgttgatgaaatcctccattttgtgctattaaactgttaccaaccctttatggggcatggcatcatttcaccagcgctgcattcaatcatgtttttc

SEQ ID NO: 2459 - DNA, 157 bp, Ricinus communis
aaacatcattgagtgcagcgttgatgaattcccctacatgacatatttctgttggttaattcattaccaatatcccttctttaaaaaaagaagtaaacctttttgggaatagatggttttggatgatttcaccagcgctgcattcaatcatgttttt

SEQ ID NO: 2460 - DNA, 91 bp, Sorghum bicolor
tcattgagtgcagcgttgatgagccagctggccggccagccgtgcgtccgccgccggcgccggccacggctcaccggcgctgcactcaatt

SEQ ID NO: 2461 - DNA, 123 bp, Theobroma cacao
attcccagatggaagacacatcattgagtgcagcgttgatgaattctttcactttttgccaactctatctcagatgaattcgccagcgctgcactcaatcatgtgttttgctctttctggaaa

SEQ ID NO: 2462 - DNA, 118 bp, Vitis vinifera
gaagaaaacatcattgagtgcagcgttgatgaaactgaagtattccatttttcagcttctttgaagtccggcaagatgggttctggttgattccattggcgctgcactcaatcatgtc

SEQ ID NO: 2463 - DNA, 118 bp, Vitis vinifera; identical to SEQ ID NO: 2462

SEQ ID NO: 2464 - DNA, 109 bp, Arabidopsis thaliana
tgaatgaacatcattgagtgcatcgttgatgtaattttacttattttattccattgttgaattaattaaagaagtatatatcagcgttgcattcaattatgtttttcta

SEQ ID NO: 2465 - DNA, 118 bp, Oryza sativa
agggaaggcattattgagtgcagcgttgatgaacctgccggccggctaaattaattagcaagaaagtctgaaactggctcaaaggttcaccagcactgcacccaatcacgcctttgct

SEQ ID NO: 2466 - DNA, 134 bp, Picea abies
agccgtggcaaccacatcattgagtgcagcgttgacgatagaaattccaccaatagatttgataatatctatctatttgtggaatgccattgatattgttaaccctgcactcaatagtatgtttgccaatggct

SEQ ID NO: 2467 - DNA, 114 bp, Populus trichocarpa
taattatacaccattgagtgcagcgttgatgaaattctcttgttagcttacttagctattttctcacgatggcgtggaatcatttcaccagcgctgcattcaaccatgtttttc

SEQ ID NO: 2468 - DNA, 116 bp, Solanum lycopersicum
cagagtacttagaaacatgattgagtgcagcgttgatgacatatttgagaagtcctgcatttgggccttcctcatttttcatcaacgctaaactcgatcatgtttttaattctctg

SEQ ID NO: 2469 - DNA, 292 bp, Brachypodium distachyon
gcgaagaggaattagaagaggcgcaaaggcatcattgagtgcagcgttgatgaacaggggccaggcgaccggcggccggtccggttcggttcaccggcgctgcacacagtgacgcccttgcattctctggcccgattcatttgtgtgcgaagaggaattagaagaggcgcaaaggcatcattgagtgcagcgttgatgaacaggggccaggcgaccggcggccggtccggttcggttcaccggcgctgcacacagtgacgcccttgcattctctggcccgattcatttgtgt

SEQ ID NO: 2470 - DNA, 79 bp, Gossypium hirsutum
ttcattgagtgcagtgttgattaggcgtagcaagtaggtcttgccgctgtccactggcaatgagaaacctgcctgtgaa

SEQ ID NO: 2471 - DNA, 113 bp, Hordeum vulgare
cgcagaggtgccgttgagtgcagcgttgatgaaccgtccggccatggcccgtccgcctccaccgaggccggagcggttcaccggcgctgcacgcaatgacgcctctgctttct

SEQ ID NO: 2472 - DNA, 71 bp, Populus trichocarpa
caagtttagttcattgagtggagctttgatgacaatttgttttaaaagctctactgtattcgaacaatatg

SEQ ID NO: 2473 - DNA, 114 bp, Oryza sativa; identical to SEQ ID NO: 2457

SEQ ID NO: 2474 - DNA, 118 bp, Oryza sativa; identical to SEQ ID NO: 2465

SEQ ID NO: 2475 - DNA, 149 bp, Gossypium hirsutum
ttattgagtgcagccgtgatatgcgaagcactgtgccttgcgaaggggacactgcagtgttcaagcatcaaggttaggaatggtgaaatggaggaatggatgggttgcaatggaaggagaaaacaagaaagatcatggctaggccatag

SEQ ID NO: 2476 - DNA, 67 bp, Glycine max; identical to SEQ ID NO: 2323

SEQ ID NO: 2477 - DNA, 135 bp, Medicago truncatula; identical to SEQ ID NO: 2324

SEQ ID NO: 2478 - DNA, 95 bp, Medicago truncatula; identical to SEQ ID NO: 2326

SEQ ID NO: 2479 - DNA, 100 bp, Medicago truncatula; identical to SEQ ID NO: 2327

SEQ ID NO: 2480 - DNA, 98 bp, Medicago truncatula; identical to SEQ ID NO: 2328

SEQ ID NO: 2481 - DNA, 76 bp, Medicago truncatula; identical to SEQ ID NO: 2330

SEQ ID NO: 2482 - DNA, 76 bp, Medicago truncatula; identical to SEQ ID NO: 2331

SEQ ID NO: 2483 - DNA, 98 bp, Medicago truncatula; identical to SEQ ID NO: 2328

SEQ ID NO: 2484 - DNA, 101 bp, Medicago truncatula; identical to SEQ ID NO: 2333

SEQ ID NO: 2485 - DNA, 100 bp, Medicago truncatula; identical to SEQ ID NO: 2334

SEQ ID NO: 2486 - DNA, 101 bp, Medicago truncatula; identical to SEQ ID NO: 2333

SEQ ID NO: 2487 - DNA, 83 bp, Medicago truncatula; identical to SEQ ID NO: 2336

SEQ ID NO: 2488 - DNA, 105 bp, Medicago truncatula; identical to SEQ ID NO: 2337

SEQ ID NO: 2489 - DNA, 111 bp, Medicago truncatula; identical to SEQ ID NO: 2338

SEQ ID NO: 2490 - DNA, 122 bp, Sorghum bicolor; identical to SEQ ID NO: 2357

SEQ ID NO: 2491 - DNA, 85 bp, Zea mays; identical to SEQ ID NO: 2266

SEQ ID NO: 2492 - DNA, 66 bp, Zea mays; identical to SEQ ID NO: 2267

SEQ ID NO: 2493 - DNA, 70 bp, Zea mays; identical to SEQ ID NO: 2268

SEQ ID NO: 2494 - DNA, 140 bp, Arabidopsis lyrata; identical to SEQ ID NO: 2302

SEQ ID NO: 2495 - DNA, 105 bp, Arabidopsis lyrata; identical to SEQ ID NO: 2303

SEQ ID NO: 2496 - DNA, 105 bp, Arabidopsis lyrata; identical to SEQ ID NO: 2304

SEQ ID NO: 2497 - DNA, 93 bp, Arabidopsis thaliana; identical to SEQ ID NO: 2305

SEQ ID NO: 2498 - DNA, 100 bp, Arabidopsis thaliana; identical to SEQ ID NO: 2306

SEQ ID NO: 2499 - DNA, 95 bp, Arabidopsis thaliana; identical to SEQ ID NO: 2307

SEQ ID NO: 2500 - DNA, 181 bp, Brachypodium distachyon; identical to SEQ ID NO: 2308

SEQ ID NO: 2501 - DNA, 238 bp, Brachypodium distachyon; identical to SEQ ID NO: 2309

SEQ ID NO: 2502 - DNA, 126 bp, Brachypodium distachyon; identical to SEQ ID NO: 2310

SEQ ID NO: 2503 - DNA, 150 bp, Brachypodium distachyon; identical to SEQ ID NO: 2311

SEQ ID NO: 2504 - DNA, 96 bp, Brachypodium distachyon; identical to SEQ ID NO: 2312

SEQ ID NO: 2505 - DNA, 89 bp, Brachypodium distachyon; identical to SEQ ID NO: 2313

SEQ ID NO: 2506 - DNA, 76 bp, Brachypodium distachyon; identical to SEQ ID NO: 2314

SEQ ID NO: 2507 - DNA, 90 bp, Brachypodium distachyon; identical to SEQ ID NO: 2315

SEQ ID NO: 2508 - DNA, 88 bp, Brachypodium distachyon; identical to SEQ ID NO: 2316

SEQ ID NO: 2509 - DNA, 86 bp, Brachypodium distachyon; identical to SEQ ID NO: 2317

SEQ ID NO: 2510 - DNA, 96 bp, Brachypodium distachyon; identical to SEQ ID NO: 2318

SEQ ID NO: 2511 - DNA, 95 bp, Brachypodium distachyon; identical to SEQ ID NO: 2319

SEQ ID NO: 2512 - DNA, 90 bp, Brachypodium distachyon; identical to SEQ ID NO: 2320

SEQ ID NO: 2513 - DNA, 101 bp, Citrus sinensis; identical to SEQ ID NO: 2321

SEQ ID NO: 2514 - DNA, 107 bp, Gossypium hirsutum; identical to SEQ ID NO: 2322

SEQ ID NO: 2515 - DNA, 124 bp, Medicago truncatula; identical to SEQ ID NO: 2391

SEQ ID NO: 2516 - DNA, 63 bp, Medicago truncatula; identical to SEQ ID NO: 2329

SEQ ID NO: 2517 - DNA, 101 bp, Medicago truncatula; identical to SEQ ID NO: 2392

SEQ ID NO: 2518 - DNA, 86 bp, Oryza sativa; identical to SEQ ID NO: 2269

SEQ ID NO: 2519 - DNA, 88 bp, Oryza sativa; identical to SEQ ID NO: 2270

SEQ ID NO: 2520 - DNA, 88 bp, Oryza sativa; identical to SEQ ID NO: 2271

SEQ ID NO: 2521 - DNA, 86 bp, Oryza sativa; identical to SEQ ID NO: 2272

SEQ ID NO: 2522 - DNA, 112 bp, Oryza sativa; identical to SEQ ID NO: 2273

SEQ ID NO: 2523 - DNA, 99 bp, Oryza sativa; identical to SEQ ID NO: 2274

SEQ ID NO: 2524 - DNA, 112 bp, Oryza sativa; identical to SEQ ID NO: 2275

SEQ ID NO: 2525 - DNA, 99 bp, Oryza sativa; identical to SEQ ID NO: 2276

SEQ ID NO: 2526 - DNA, 94 bp, Oryza sativa; identical to SEQ ID NO: 2277

SEQ ID NO: 2527 - DNA, 120 bp, Oryza sativa; identical to SEQ ID NO: 264

SEQ ID NO: 2528 - DNA, 66 bp, Oryza sativa; identical to SEQ ID NO: 2278

SEQ ID NO: 2529 - DNA, 69 bp, Oryza sativa; identical to SEQ ID NO: 2395

SEQ ID NO: 2530 - DNA, 68 bp, Oryza sativa; identical to SEQ ID NO: 2279

SEQ ID NO: 2531 - DNA, 68 bp, Oryza sativa; identical to SEQ ID NO: 2280

SEQ ID NO: 2532 - DNA, 68 bp, Oryza sativa; identical to SEQ ID NO: 2281

SEQ ID NO: 2533 - DNA, 86 bp, Oryza sativa; identical to SEQ ID NO: 2282

SEQ ID NO: 2534 - DNA, 110 bp, Oryza sativa; identical to SEQ ID NO: 2283

SEQ ID NO: 2535 - DNA, 98 bp, Populus trichocarpa; identical to SEQ ID NO: 2343

SEQ ID NO: 2536 - DNA, 101 bp, Populus trichocarpa; identical to SEQ ID NO: 2344

SEQ ID NO: 2537 - DNA, 101 bp, Populus trichocarpa; identical to SEQ ID NO: 2345

SEQ ID NO: 2538 - DNA, 113 bp, Populus trichocarpa; identical to SEQ ID NO: 2346

SEQ ID NO: 2539 - DNA, 113 bp, Populus trichocarpa; identical to SEQ ID NO: 2347

SEQ ID NO: 2540 - DNA, 102 bp, Populus trichocarpa; identical to SEQ ID NO: 2348

SEQ ID NO: 2541 - DNA, 102 bp, Populus trichocarpa; identical to SEQ ID NO: 2348

SEQ ID NO: 2542 - DNA, 102 bp, Populus trichocarpa; identical to SEQ ID NO: 2350

SEQ ID NO: 2543 - DNA, 102 bp, Populus trichocarpa; identical to SEQ ID NO: 2350

SEQ ID NO: 2544 - DNA, 74 bp, Ricinus communis; identical to SEQ ID NO: 2352

SEQ ID NO: 2545 - DNA, 97 bp, Ricinus communis; identical to SEQ ID NO: 2353

SEQ ID NO: 2546 - DNA, 82 bp, Ricinus communis; identical to SEQ ID NO: 2354

SEQ ID NO: 2547 - DNA, 87 bp, Ricinus communis; identical to SEQ ID NO: 2355

SEQ ID NO: 2548 - DNA, 74 bp, Ricinus communis; identical to SEQ ID NO: 2352

SEQ ID NO: 2549 - DNA, 150 bp, Sorghum bicolor; identical to SEQ ID NO: 2284

SEQ ID NO: 2550 - DNA, 105 bp, Sorghum bicolor; identical to SEQ ID NO: 2285

SEQ ID NO: 2551 - DNA, 73 bp, Sorghum bicolor; identical to SEQ ID NO: 2286

SEQ ID NO: 2552 - DNA, 103 bp, Sorghum bicolor; identical to SEQ ID NO: 2287

SEQ ID NO: 2553 - DNA, 105 bp, Sorghum bicolor; identical to SEQ ID NO: 2288

SEQ ID NO: 2554 - DNA, 68 bp, Sorghum bicolor; identical to SEQ ID NO: 2289

SEQ ID NO: 2555 - DNA, 81 bp, Sorghum bicolor; identical to SEQ ID NO: 2290

SEQ ID NO: 2556 - DNA, 97 bp, Sorghum bicolor; identical to SEQ ID NO: 2291

SEQ ID NO: 2557 - DNA, 87 bp, Sorghum bicolor; identical to SEQ ID NO: 2292

SEQ ID NO: 2558 - DNA, 94 bp, Solanum demissum; identical to SEQ ID NO: 2360

SEQ ID NO: 2559 - DNA, 199 bp, Solanum lycopersicum; identical to SEQ ID NO: 2361

SEQ ID NO: 2560 - DNA, 101 bp, Solanum lycopersicum; identical to SEQ ID NO: 2362

SEQ ID NO: 2561 - DNA, 77 bp, Triticum aestivum; identical to SEQ ID NO: 2293

SEQ ID NO: 2562 - DNA, 124 bp, Triticum aestivum; identical to SEQ ID NO: 2363

SEQ ID NO: 2563 - DNA, 123 bp, Theobroma cacao; identical to SEQ ID NO: 2364

SEQ ID NO: 2564 - DNA, 117 bp, Theobroma cacao; identical to SEQ ID NO: 2365

SEQ ID NO: 2565 - DNA, 92 bp, Vitis vinifera; identical to SEQ ID NO: 2366

SEQ ID NO: 2566 - DNA, 90 bp, Vitis vinifera; identical to SEQ ID NO: 2367

SEQ ID NO: 2567 - DNA, 92 bp, Vitis vinifera; identical to SEQ ID NO: 2368

SEQ ID NO: 2568 - DNA, 86 bp, Vitis vinifera; identical to SEQ ID NO: 2369

SEQ ID NO: 2569 - DNA, 92 bp, Vitis vinifera; identical to SEQ ID NO: 2370

SEQ ID NO: 2570 - DNA, 86 bp, Vitis vinifera; identical to SEQ ID NO: 2371

SEQ ID NO: 2571 - DNA, 86 bp, Vitis vinifera; identical to SEQ ID NO: 2372

SEQ ID NO: 2572 - DNA, 92 bp, Vitis vinifera; identical to SEQ ID NO: 2373

SEQ ID NO: 2573 - DNA, 86 bp, Vitis vinifera; identical to SEQ ID NO: 2374

SEQ ID NO: 2574 - DNA, 86 bp, Vitis vinifera; identical to SEQ ID NO: 2375

SEQ ID NO: 2575 - DNA, 92 bp, Vitis vinifera; identical to SEQ ID NO: 2376

SEQ ID NO: 2576 - DNA, 87 bp, Vitis vinifera; identical to SEQ ID NO: 2377

SEQ ID NO: 2577 - DNA, 92 bp, Vitis vinifera; identical to SEQ ID NO: 2378

SEQ ID NO: 2578 - DNA, 149 bp, Zea mays; identical to SEQ ID NO: 2294

SEQ ID NO: 2579 - DNA, 114 bp, Zea mays; identical to SEQ ID NO: 2295

SEQ ID NO: 2580 - DNA, 66 bp, Zea mays; identical to SEQ ID NO: 2267

SEQ ID NO: 2581 - DNA, 85 bp, Zea mays; identical to SEQ ID NO: 2266

SEQ ID NO: 2582 - DNA, 70 bp, Zea mays; identical to SEQ ID NO: 2298

SEQ ID NO: 2583 - DNA, 85 bp, Zea mays; identical to SEQ ID NO: 2266

SEQ ID NO: 2584 - DNA, 66 bp, Zea mays; identical to SEQ ID NO: 2300

SEQ ID NO: 2585 - DNA, 89 bp, Zea mays; identical to SEQ ID NO: 2301

SEQ ID NO: 2586 - DNA, 111 bp, Arabidopsis lyrata; identical to SEQ ID NO: 2383

SEQ ID NO: 2587 - DNA, 127 bp, Arabidopsis lyrata; identical to SEQ ID NO: 2384

SEQ ID NO: 2588 - DNA, 135 bp, Arabidopsis lyrata; identical to SEQ ID NO: 2385

SEQ ID NO: 2589 - DNA, 93 bp, Arabidopsis lyrata; identical to SEQ ID NO: 2386

SEQ ID NO: 2590 - DNA, 100 bp, Arabidopsis thaliana; identical to SEQ ID NO: 2387

SEQ ID NO: 2591 - DNA, 100 bp, Arabidopsis thaliana; identical to SEQ ID NO: 2388

SEQ ID NO: 2592 - DNA, 112 bp, Arabidopsis thaliana; identical to SEQ ID NO: 2389

SEQ ID NO: 2593 - DNA, 186 bp, Gossypium hirsutum; identical to SEQ ID NO: 2390

SEQ ID NO: 2594 - DNA, 72 bp, Medicago truncatula; identical to SEQ ID NO: 2393

SEQ ID NO: 2595 - DNA, 142 bp, Oryza sativa; identical to SEQ ID NO: 2339

SEQ ID NO: 2596 - DNA, 142 bp, Oryza sativa; identical to SEQ ID NO: 2339

SEQ ID NO: 2597 - DNA, 89 bp, Oryza sativa; identical to SEQ ID NO: 2340

SEQ ID NO: 2598 - DNA, 82 bp, Oryza sativa; identical to SEQ ID NO: 2341

SEQ ID NO: 2599 - DNA, 143 bp, Oryza sativa; identical to SEQ ID NO: 2342

SEQ ID NO: 2600 - DNA, 80 bp, Sorghum bicolor; identical to SEQ ID NO: 2358

SEQ ID NO: 2601 - DNA, 84 bp, Sorghum bicolor; identical to SEQ ID NO: 2359

SEQ ID NO: 2602 - DNA, 138 bp, Zea mays; identical to SEQ ID NO: 2379

SEQ ID NO: 2603 - DNA, 81 bp, Zea mays; identical to SEQ ID NO: 2380

SEQ ID NO: 2604 - DNA, 82 bp, Zea mays; identical to SEQ ID NO: 2381

SEQ ID NO: 2605 - DNA, 226 bp, Zea mays; identical to SEQ ID NO: 2382

SEQ ID NO: 2606 - DNA, 166 bp, Arabidopsis lyrata; identical to SEQ ID NO: 2399

SEQ ID NO: 2607 - DNA, 100 bp, Aquilegia caerulea; identical to SEQ ID NO: 2400

SEQ ID NO: 2608 - DNA, 80 bp, Aquilegia caerulea; identical to SEQ ID NO: 2401

SEQ ID NO: 2609 - DNA, 84 bp, Gossypium hirsutum; identical to SEQ ID NO: 2402

SEQ ID NO: 2610 - DNA, 86 bp, Oryza sativa; identical to SEQ ID NO: 2396

SEQ ID NO: 2611 - DNA, 69 bp, Oryza sativa; identical to SEQ ID NO: 2397

SEQ ID NO: 2612 - DNA, 103 bp, Picea abies; identical to SEQ ID NO: 2404

SEQ ID NO: 2613 - DNA, 226 bp, Populus trichocarpa; identical to SEQ ID NO: 2405

SEQ ID NO: 2614 - DNA, 84 bp, Zea mays; identical to SEQ ID NO: 2398

SEQ ID NO: 2615 - DNA, 148 bp, Brachypodium distachyon; identical to SEQ ID NO: 2406

SEQ ID NO: 2616 - DNA, 96 bp, Oryza sativa; identical to SEQ ID NO: 2403

SEQ ID NO: 2617 - DNA, 137 bp, Vitis vinifera; identical to SEQ ID NO: 2408

SEQ ID NO: 2618 - DNA, 69 bp, Oryza sativa; identical to SEQ ID NO: 2407

SEQ ID NO: 2619 - DNA, 178 bp, Physcomitrella patens; identical to SEQ ID NO: 2409

SEQ ID NO: 2620 - DNA, 276 bp, Brassica napus
gtttcaggcagtctccttggctatcttgacatgcttttttcttccatgttataccttctttctttgtatttttcgaatccaaataatatttttttctataaatttactacgaaaatcctttaaacaatctctaacaaagtatgttattagaaaactaccactttttgcatttattacaaatgcatgtacgtggtgagtgtatgcattctttagaaggaaatgtcaaaggtgaatagaagatcatatttggtagccaaggatgacttgcctatttct

SEQ ID NO: 2621 - DNA, 125 bp, Sorghum bicolor
tggcgagagcctgcctttggtagccaaggatgacttgcctacatggcattgcgagttccggttgcatggccagttcagctgagtttgtgggcggtcaccttgggacggtatcgataagcttgata

SEQ ID NO: 2622 - DNA, 89 bp, Zea mays
tagccaaggatgacttgcctatgtcctttgtttacaaaggacctgaatgtgtggaccattgagaggttcataggcagtctccttggcta

SEQ ID NO: 2623 - DNA, 155 bp, Sorghum bicolor
gcgataagagtctgcccagatagccaaggatgacttgcctgtggcctcttggcttggcttgagagcttattaactctgtgcacgtttaatttggctcttcttggggcctcgatcacagggcagtctcccttggctagtccggggcgggctcctta

SEQ ID NO: 2624 - DNA, 191 bp, Zea mays
gtagccaaggatgacttgccggccgacatatgcctctctcgttcgtccctgaccggccgggaaacacatcacgccgcatgcatgcatgcatgcatatgtgtgtacgtactacgtgtgcatgcatgcatgtgctgccgcgcgcagcaaactgcgaggaatcgtccgtccggcaggttcttctctttggctac

SEQ ID NO: 2625 - DNA, 145 bp, Zea mays
cccggcagctcgatcgtgtgctagctcatcagcttacacttagcaagcaaatgaagcatgcagttctcgccatgagtataaattatcatctgaggccttgcatgtggggatgaggctgttatgtagccaaggatgacttgccggg

SEQ ID NO: 2626 - DNA, 69 bp, Zea mays
cgcgtagccaaggatgacttgccggcattatatttcttggcccgccggcaagtcatctggggctacgcg

SEQ ID NO: 2627 - DNA, 89 bp, Zea mays
tagccaaggatgacttgcctatgtcctttgtttacaaaggatcagaattgtggacctttgtgttggttcgtaggcagtctccttggcta

SEQ ID NO: 2628 - DNA, 131 bp, Zea mays
tgtagccaaggatgacttgccggccgatgcctcctcgatatacaatcgtcgcacatccctgggcggccgggaacgtcgcatgcatgcaaactgttggggcatcggccggcaggttcttctctttggctaca

SEQ ID NO: 2629 - DNA, 95 bp, Zea mays
cagccaaggatgacttgccggctcctggaacctggaggcgtctcagcttgctgtgctgtggcttagaacttagtcggcaagtctgtccttggcta

SEQ ID NO: 2630 - DNA, 125 bp, Sorghum bicolor; identical to SEQ ID NO: 2621

SEQ ID NO: 2631 - DNA, 276 bp, Brassica napus; identical to SEQ ID NO: 2620

SEQ ID NO: 2632 - DNA, 121 bp, Brachypodium distachyon
gcagagaaggggatgcagccaaggatgacttgccgactcctggtgttgggggaattgcagctttgttgagccttgagttagccggcaggttgtccttggctacacctagttctcttcttct

SEQ ID NO: 2633 - DNA, 91 bp, Sorghum bicolor
cagccaaggatgacttgccgatcgatcgatgcaaactcctctgatgtctgatctcatcagattatcgttgtcggaaagttgttcttggcta

SEQ ID NO: 2634 - DNA, 95 bp, Medicago truncatula
aagccaaggatgacttgctgggctaaaaaccattacatgggacctgatgagtatgtcccttgtttagtttccggcaggcgggttatcctaggctt

SEQ ID NO: 2635 - DNA, 240 bp, Sorghum bicolor
  misc_feature (205)..(205): n is a, c, g, or t
agagtggttggtagctctggtagccaaggatgacttgcctgtgtgccggcctcgatcgatctcccggccctctcaaggatcgatcatcgtgcgtgcgtgtcgatcgatcgtcgtcgtcgtcgtcacctctggcagagagcgagacgatgatcgatcgattagccgcgcgccttgggttgttggggtgtggtcgcggtctcacagncagtctccttggctagccctgactcactcttatca

SEQ ID NO: 2636 - DNA, 97 bp, Sorghum bicolor
gctagccaaggagactgcctatgaaccatctatctcaaaggctcacatttctgatccttcggcacaaaggacacaggcaagtcatccttggctatca

SEQ ID NO: 2637 - DNA, 155 bp, Sorghum bicolor; identical to SEQ ID NO: 2623

SEQ ID NO: 2638 - DNA, 145 bp, Zea mays; identical to SEQ ID NO: 2625

SEQ ID NO: 2639 - DNA, 89 bp, Zea mays; identical to SEQ ID NO: 2627

SEQ ID NO: 2640 - DNA, 82 bp, Medicago truncatula
tagccaaggacaacttgccggcacaatgaggcagaaatcacatgaacattcgccaatgttgtcggcaagtcatccttggctg

SEQ ID NO: 2641 - DNA, 69 bp, Zea mays; identical to SEQ ID NO: 2626

SEQ ID NO: 2642 - DNA, 191 bp, Zea mays; identical to SEQ ID NO: 2624

SEQ ID NO: 2643 - DNA, 89 bp, Zea mays; identical to SEQ ID NO: 2622

SEQ ID NO: 2644 - DNA, 257 bp, Zea mays
gtgaagtgtttggaggaactctaggtgttatccagcaatgtttcatagtttgtgaaactgtaaaaggttttggtaagacgatgatcagatttggtgttatcatgagttcctttcaaacacttcacatgcagcttctcattggtggatatattcttgagacccgtgtgaagtgtttggaggaactcttgataccaataagtttttcccccaaatataatagctggttgcttccccggagttccttccaaacacttcac

SEQ ID NO: 2645 - DNA, 81 bp, Zea mays
gagttcctttcaaacacttcacatggagcttctcattggtcgatatattcttgagacccgtgtgaagtgtttggaggaact

SEQ ID NO: 2646 - DNA, 84 bp, Zea mays
gagtttccttcaagcacttcacatggagcattctgtcttagagaaagcttaatttattgcattgtgaagtgtttgaggaaactc

SEQ ID NO: 2647 - DNA, 208 bp, Sorghum bicolor
gcactattttgagagcttttgtgaagtgtttgggggaactcttgatgccactaaccatttgctagaggttggccaagtgtgtgctacatgagccaagtgtgtgctacatgaaatgatttgaagacaaatcacatttggaaattatatatcaagtttggtgtccccaggagttctctgcaaacacttcacaaagcacttttttagagct

SEQ ID NO: 2648 - DNA, 104 bp, Sorghum bicolor
tcaagtttggtgtcccccaggagttctctgcaaacacttcacaaagcacttttttagagcttttgtgaagtgtttgggggaactcttggtgccactgatcattt

SEQ ID NO: 2649 - DNA, 142 bp, Zea mays
gcgggggcgacctgagaacacatgcagcattattatgcgtacaagatgaacggcgacgacggtggtccaggccagcacgaaccgtaccgcgaggcgagcaatctcatctcattattctcatgtgttctcagttcgcccccgc

SEQ ID NO: 2650 - DNA, 142 bp, Zea mays
gcgggggcgaactgagaacacatgagaataatgagatgagattgctcgcctcgcggtacggttcgtgctggcctggaccaccgtcgtcgccgttcatcttgtacgcataataatgctgcatgtgttctcaggtcgcccccgc

SEQ ID NO: 2651 - DNA, 77 bp, Medicago truncatula
cagggtcgacatgagagcacatgaagctatcatggttgtctatgttatccaactcatgtgttctcaggtcgcccctg

SEQ ID NO: 2652 - DNA, 67 bp, Gossypium hirsutum
gaggggtgccacctaagaacacaggtcatcccttaaccaaatagcttgtgttctcaggtcacccctt

SEQ ID NO: 2653 - DNA, 80 bp, Zea mays
tcattgagcgcagcgttgatgagccagccgccgtgcctcccctgtcggctgcggcggctcaccagcgctgcactcaatta

SEQ ID NO: 2654 - DNA, 257 bp, Zea mays; identical to SEQ ID NO: 2644

SEQ ID NO: 2655 - DNA, 81 bp, Zea mays; identical to SEQ ID NO: 2645

SEQ ID NO: 2656 - DNA, 84 bp, Zea mays; identical to SEQ ID NO: 2646

SEQ ID NO: 2657 - DNA, 208 bp, Sorghum bicolor; identical to SEQ ID NO: 2647

SEQ ID NO: 2658 - DNA, 104 bp, Sorghum bicolor; identical to SEQ ID NO: 2648

SEQ ID NO: 2659 - DNA, 50 bp, Artificial sequence
  Single strand DNA oligonucleotide
gtcgtatccagtgcagggtccgaggtattcgcactggatacgactcatcc

SEQ ID NO: 2660 - DNA, 24 bp, Artificial sequence
  Single strand DNA oligonucleotide
cggcgggaaataggataggaggag

SEQ ID NO: 2661 - DNA, 50 bp, Artificial sequence
  Single strand DNA oligonucleotide
gtcgtatccagtgcagggtccgaggtattcgcactggatacgaccaccta

SEQ ID NO: 2662 - DNA, 20 bp, Artificial sequence
  Single strand DNA oligonucleotide
cgcgctcggcatgtgtagga

SEQ ID NO: 2663 - DNA, 50 bp, Artificial sequence
  Single strand DNA oligonucleotide
gtcgtatccagtgcagggtccgaggtattcgcactggatacgactgtgtc

SEQ ID NO: 2664 - DNA, 22 bp, Artificial sequence
  Single strand DNA oligonucleotide
cgtcaggtagcggcctaagaac

SEQ ID NO: 2665 - DNA, 50 bp, Artificial sequence
  Single strand DNA oligonucleotide
gtcgtatccagtgcagggtccgaggtattcgcactggatacgacggtagc

SEQ ID NO: 2666 - DNA, 19 bp, Artificial sequence
  Single strand DNA oligonucleotide
cgcgcggcaaatcatccct

SEQ ID NO: 2667 - DNA, 50 bp, Artificial sequence
  Single strand DNA oligonucleotide
gtcgtatccagtgcagggtccgaggtattcgcactggatacgactcccct

SEQ ID NO: 2668 - DNA, 22 bp, Artificial sequence
  Single strand DNA oligonucleotide
ctgcagggctgatttggtgaca

SEQ ID NO: 2669 - DNA, 50 bp, Artificial sequence
  Single strand DNA oligonucleotide
gtcgtatccagtgcagggtccgaggtattcgcactggatacgactggagg

SEQ ID NO: 2670 - DNA, 18 bp, Artificial sequence
  Single strand DNA oligonucleotide
cgcgcaatcccggtggaa

SEQ ID NO: 2671 - DNA, 50 bp, Artificial sequence
  Single strand DNA oligonucleotide
gtcgtatccagtgcagggtccgaggtattcgcactggatacgactcccgc

SEQ ID NO: 2672 - DNA, 19 bp, Artificial sequence
  Single strand DNA oligonucleotide
gccgcctgaggggaaatcg

SEQ ID NO: 2673 - DNA, 50 bp, Artificial sequence
  Single strand DNA oligonucleotide
gtcgtatccagtgcagggtccgaggtattcgcactggatacgacatgagc

SEQ ID NO: 2674 - DNA, 21 bp, Artificial sequence
  Single strand DNA oligonucleotide
cggcgggaatctatcgtttgg

SEQ ID NO: 2675 - DNA, 50 bp, Artificial sequence
  Single strand DNA oligonucleotide
gtcgtatccagtgcagggtccgaggtattcgcactggatacgacaccaca

SEQ ID NO: 2676 - DNA, 24 bp, Artificial sequence
  Single strand DNA oligonucleotide
cggcgggtcaagtgactaagagca

SEQ ID NO: 2677 - DNA, 50 bp, Artificial sequence
  Single strand DNA oligonucleotide
gtcgtatccagtgcagggtccgaggtattcgcactggatacgacttgagc

SEQ ID NO: 2678 - DNA, 20 bp, Artificial sequence
  Single strand DNA oligonucleotide
ccggtggcgatgcaagagga

SEQ ID NO: 2679 - DNA, 50 bp, Artificial sequence
  Single strand DNA oligonucleotide
gtcgtatccagtgcagggtccgaggtattcgcactggatacgacgccatt

SEQ ID NO: 2680 - DNA, 24 bp, Artificial sequence
  Single strand DNA oligonucleotide
cggcggacaaaggaattagaacgg

SEQ ID NO: 2681 - DNA, 50 bp, Artificial sequence
  Single strand DNA oligonucleotide
gtcgtatccagtgcagggtccgaggtattcgcactggatacgacaccaga

SEQ ID NO: 2682 - DNA, 22 bp, Artificial sequence
  Single strand DNA oligonucleotide
cgtcgagagagaagggagcgga

SEQ ID NO: 2683 - DNA, 50 bp, Artificial sequence
  Single strand DNA oligonucleotide
gtcgtatccagtgcagggtccgaggtattcgcactggatacgacaaccag

SEQ ID NO: 2684 - DNA, 21 bp, Artificial sequence
  Single strand DNA oligonucleotide
cggcggtgatattatggacga

SEQ ID NO: 2685 - DNA, 50 bp, Artificial sequence
  Single strand DNA oligonucleotide
gtcgtatccagtgcagggtccgaggtattcgcactggatacgaccgggca

SEQ ID NO: 2686 - DNA, 20 bp, Artificial sequence
  Single strand DNA oligonucleotide
cgcgctagccaagcatgatt

SEQ ID NO: 2687 - DNA, 50 bp, Artificial sequence
  Single strand DNA oligonucleotide
gtcgtatccagtgcagggtccgaggtattcgcactggatacgactgtttg

SEQ ID NO: 2688 - DNA, 21 bp, Artificial sequence
  Single strand DNA oligonucleotide
cggcggttagatgaccatcag

SEQ ID NO: 2689 - DNA, 50 bp, Artificial sequence
  Single strand DNA oligonucleotide
gtcgtatccagtgcagggtccgaggtattcgcactggatacgacgagttc

SEQ ID NO: 2690 - DNA, 20 bp, Artificial sequence
  Single strand DNA oligonucleotide
cgcgcgtgaagtgtttgggg

SEQ ID NO: 2691 - DNA, 122 bp, Zea mays
ccaagtcgagggcagaccaggcgaagacgtctttgttcttggacaaacagcagaggagtttctcctcttcatgcgaagtgaggtcttcgctgatggtgaccgtctgcttgggcgtggcctgg

SEQ ID NO: 2692 - DNA, 419 bp, Zea mays
aggatgctgacgcaatgtgatttctgcccagtgctctgaatgtcaaagtgaagaaattcaaccaagcgcgggtaaacggcgggagtaactatgactctcttaaggtagccaaatgcctcgtcatctaattagtgacgcgcatgaatggattaacgagattcccactgtccctgtctactatccagcgaaaccacagccaagggaacgggcttggcggaatcagcggggaaagaagaccctgttgagcttgactctagtccgactttgtgaaatgacttgagaggtgtaggataagtgggagcctccgggcgcaagtgaaataccactacttttaacgttattttacttattccgtgggtcggaagcggggcaccgcccctccttttggctccaaggccccggcctcgccgggccgatcc

SEQ ID NO: 2693 - DNA, 27 bp, Artificial sequence
  Predicted folded 24-nts-long seq pre-mir
agagacatgtgactaagaacatgtagt

SEQ ID NO: 2694 - DNA, 89 bp, Artificial sequence
  Predicted folded 24-nts-long seq pre-mir
gtactccctccgtttctttttagttgtcgctggatagttcaattttgcactatccagcgatcgacaactaaaacgaaacggaaggagta

SEQ ID NO: 2695 - DNA, 43 bp, Artificial sequence
  Predicted folded 24-nts-long seq pre-mir
gcacccggggttacccctcaaggtgcttttaggagtaggacgg

SEQ ID NO: 2696 - DNA, 100 bp, Artificial sequence
  Predicted folded 24-nts-long seq pre-mir
acaaaggaactagaacggaatggctccaattagggaatattctcctcagatccggaatcattccgctccaaaaaatcaaccggacggagccgctccgttc

SEQ ID NO: 2697 - DNA, 271 bp, Artificial sequence
  Predicted folded 24-nts-long seq pre-mir
acggaaccgttctgtcccagttttgttgttgtttggttacaaagtaactagaacgaaatggctccaattaggaaatattctcctcaaatccggaaccattccgctccaaaaaatcaatgggacggagccgctctgttccaatcccgctctcacagtcacgctctgttccgttcactatgcaaccaaacaaaaaacagaaccgctccgttccagattaccaaacacagaacagagcggctccgttcctagaatcaggaatggaacggctccg

SEQ ID NO: 2698 - DNA, 271 bp, Artificial sequence
  Predicted folded 24-nts-long seq pre-mir
acggaaccgttccgtcccagttttattgttgtttggttacaaagtaactagaacggaatggctccaattagggaatattctcctcagatccggaaccattccgctccaaaaaatcaatgggacggagccgctctgttccaatcccgctctcacagtcacgctccgttccgttcactatgcaaccaaacaaaaaacagaaccgctccgttccagattaccaaacacagaacagagcggctccgttcctagaatcagggatggaacggctctg

SEQ ID NO: 2699 - DNA, 119 bp, Artificial sequence
  Predicted folded 24-nts-long seq pre-mir
tcctcctctcgcgaccggcgagtctagcccctcatccgctcctcaatgtcggtcaccgaacggtgaggaggaaactggagcggggcgcgaggcgcagagtcacgggcgagaagaggacg

SEQ ID NO: 2700 - DNA, 280 bp, Artificial sequence
  Predicted folded 24-nts-long seq pre-mir
aggacctaggtgagcgggcggttttcgcagggctacgaggcgcggtaatagaaaagggatacgatcacaacacttgaaatgacgaacgtcgattttacggttgaagagcagctgatgaagcaaaaaaggacaaagaccatcacatgaacaagtttctgcaacaggggttggcctgtttgcccatcatgatccattttcctccgggccctgccaacaagtgagaaacttagccgcctccgatactactaatcttttgttatgcacaataactctcatctag

SEQ ID NO: 2701 - DNA, 225 bp, Artificial sequence
  Predicted folded 24-nts-long seq pre-mir
aggacgctgctggagacggagaatatatagaggacagaatcttttagagtgttctgtaaaggacagagaatattcctttacgggacgaaatttaggggacgctgctggagacagtttaagactgtctccagcaacgtcctctatattcatcatctatatctgtcctttacagtctcctctaaaagatttcatcatttatatctcctttttctccaacaacgtcct

SEQ ID NO: 2702 - DNA, 129 bp, Artificial sequence
  Predicted folded 24-nts-long seq pre-mir
agggcatgttcggtttgaaggggtttgagggggattggaggggattaaatcccctcctatttaaatttgtatagaaggggatttaatcccctccaatccctctcgtccacccctaaccgaacaagccct

SEQ ID NO: 2703 - DNA, 341 bp, Artificial sequence
  Predicted folded 24-nts-long seq pre-mir
atctttcaacggctgcgaagaaggaacaataatattatatgcctgaaaataatgccgaagcttcctggatgccattagaacggcatacaacaccttctccagttctgtataatttttctttgagacactaaggacctcagatacaaaatatactgggacctgcttcttgatttgtccatcaaacttctcctgcacaagtgccgcacttactgctgagtgcgaagctgccacatacaacaacagaggagcccctggcattggtggagttaatgttgttagatctatcaggtattgcttgagttcttcgaaagctttttgttgagctgggccccattgaaaga

SEQ ID NO: 2704 - DNA, 328 bp, Artificial sequence
  Predicted folded 24-nts-long seq pre-mir
ggagtgttatgtcccagttttgttgttgttggttacaaagtagctagaacggagtggctccaattagagaatattctcctcaaatccggaaccataccactccaaaaaatcaaccggacggagccgctccgttcccagcccgctcgcacagtcacgcgactcaggtacctgctaatttctacttcagtgactcttcaaccaaacaaaggatggagccgctctgttccagttcactctgcaaccaaacaaaaaacagagccgctccgttccagcttaccaaacacagaacagagcggctccgttcctagaattagggatggaacggctc

SEQ ID NO: 2705 - DNA, 55 bp, Artificial sequence
  Predicted folded 24-nts-long seq pre-mir
ccctgtcgtcctccctcgtccctccaattttgagggataactggggacaacactg

SEQ ID NO: 2706 - DNA, 224 bp, Artificial sequence
  Predicted folded 24-nts-long seq pre-mir
ctgtacctgcactccccatttccacactgtctctctcctctccgcagctctctgcgggcgcgcgcggctgctggcgggccccaggtgtcatagactgcatgcggagtgggatggggagtgttgctggaaacggagacggatacggagaggagagagaatgtgtcggccgcgcgttttagggatacggagagggagtctgctggagttggtctaacaataaagac

SEQ ID NO: 2707 - DNA, 242 bp, Artificial sequence
  Predicted folded 24-nts-long seq pre-mir
tccagcagactccctctccgtatccctaaaacgcacggccaacagtttttctctcctctccgtatctgtctccgtttccagcagactccgtatttgcactccgcatgcagtctatgacacctggggcccgcgagcagccgcgcgcgcatgcagtgagctgcggagaggagagagaaagcgtggaaaaagggaatgcaggtacaggccgtgcgttttagggagacggatgcggagactgctgg

SEQ ID NO: 2708 - DNA, 108 bp, Artificial sequence
  Predicted folded 24-nts-long seq pre-mir
ggttaggggtggattgagggggattggaggggattaaatccccttctatacaaatttgaataggagatgatttaatcccctccaatccccctcaatgcacctcaaacc

SEQ ID NO: 2709 - DNA, 27 bp, Artificial sequence
  Predicted folded 24-nts-long seq pre-mir
agagacatgtgactaagaacatgtagt

SEQ ID NO: 2710 - DNA, 92 bp, Artificial sequence
  Predicted folded 24-nts-long seq pre-mir
gtggaatggaggagattgaggggactagaatccctcactatttaaaattgaatagtaggggattctagccccctcaatcccctctattaccc

SEQ ID NO: 2711 - DNA, 85 bp, Artificial sequence
  Predicted folded 24-nts-long seq pre-mir
tggctgaaggcagaaccaggggaggcagcctaccccttagagccttaataggtagtatagattcctgttggttgtctttagacca

SEQ ID NO: 2712 - DNA, 57 bp, Artificial sequence
  Predicted folded 24-nts-long seq pre-mir
gttctccgctccctacacaccacagcaaaatggtgtggtagagaggaagaacaggac

SEQ ID NO: 2713 - DNA, 89 bp, Artificial sequence
  Predicted folded 24-nts-long seq pre-mir
agggactctctttatttccgacggccaaggtggtgggccgtcggaaatagacgtatttccgacggctggccgtaggccgtcggaaataa

SEQ ID NO: 2714 - DNA, 43 bp, Artificial sequence
  Predicted folded 24-nts-long seq pre-mir
gctcccaggaaacgcggctagggttcgttttctgggagcgcgg

SEQ ID NO: 2715 - DNA, 334 bp, Artificial sequence
  Predicted folded 24-nts-long seq pre-mir
agtcgctccgttcccagcccgctcgcacagctcgccctcccatctgtgtgcagcagctcgcgcgcctccctctgcaaccaaacaaaaaacagagccgctctgttccagttcactctgcaaccaaacaaaaaacatagtcgctccgttccaacttaggccatgttcgtttgcgtcggattgcacccggaatcaagtcagctaatcaaagtttatataaattagagaagcaatccggttagtaatcgttctgacccaccaatccggcacaaacgaacaaggtcttaccaaacacagaacagagcggctccgttcctagaatcagggatggaacggc

SEQ ID NO: 2716 - DNA, 31 bp, Artificial sequence
  Predicted folded 24-nts-long seq pre-mir
ccgttgttgggagctctctgttcgatggcgc

SEQ ID NO: 2717 - DNA, 58 bp, Zea mays
aacgtcgtgtcgtgcttgggctgtagcctcggtccatagtgctagcccggcccgacac

SEQ ID NO: 2718 - DNA, 417 bp, Zea mays
acctggaccaatacatgagattcttgtgctatttgggggatttggtcttctactaggaggtctaggagtagtattacttaccaacccaatttattctgccttttcgctaggattagttcttgtttgtatatccttattctattttttattaaattcctactttgtagctgtcgcacaacttcttatttatgtgggagccataaatgtcttgatcatatttgctgtaatgtttgtaaacggctcagagtggtctaaagataagaattattggactattggagatgggtttactttactcctttgtataactattcctttttcactaatgactactatcccagatacgtcgtggtatggaattctttggactacaagatcaaaccaaatagtagaacagggtctcataaataacgttca

SEQ ID NO: 2719 - DNA, 271 bp, Zea mays
agaagcgacaatgggacggagttcaagaactctcaaattgaaagcttccttgaggaggagggcatcaagcatgagttctcttctccctacactccacaacaaaatggtgtagtggagaggaagaatcgaactctattggacatggcaagaaccatgcttgatgagtacaagacaccggaccggttttgggccgaagcgatcaacaccgcctgctacgccatcaaccggttatatcttcaccgaatcctcaagaagacatcatatgaactcc

SEQ ID NO: 2720 - DNA, 223 bp, Zea mays
tttatcctcgtcgtatcctttatatggaaatccggggccagagggtcattcccttgactcgtactgatgagaagttttttactccatcaaaaattgaacaaaaagctgccgaattggtctatttcttgcgtgtaccaattgaagtattttgagtaccagttgcaattgtaaggggattttcgagtatttatctaaagtaaaggaaggaacaaacgaggataag

SEQ ID NO: 2721 - DNA, 43 bp, Zea mays
ccaagagatggaagggcatagctttttttgttttttcatcttt

SEQ ID NO: 2722 - DNA, 415 bp, Zea mays
ttggctctggcaccgccgactagctcatgttgggatgaagaatcttcataagcttctaaagggagaacacattttaggattaacaaatgttcattttgagaaagacatgatttgtagcgcatgcccaagcagggaagcaagttggcacccatcatccacacaagaacatcatgacgaccgacaggccgcttgagctactccacatggatctattcggcccgatcgcttacataagcatcggcgggagtaagtattgtcttgtgattgttgatgattattctcgcttcacttgggtattctttttacaggaaaaatctcaaacccaagagaccttaaagggattcttgagacgggctcaaaatgagtttggcttaaggatcaagaaaataagaagcgacaacgggacggagttcaa

SEQ ID NO: 2723 - DNA, 58 bp, Zea mays
atgcctgctggtaccactcgttgatttccggaggaggaggatggagaggtacgtcagg

SEQ ID NO: 2724 - DNA, 44 bp, Zea mays
gatgggtaggagagcgttgatggcggcagcgcacctcctaccca

SEQ ID NO: 2725 - DNA, 239 bp, Zea mays
gatggttcataggtgacggtagtaaaatttgctgatttgtactgaaggttgataaaaatataaaaaattattgacagtgaaagtattttctgtatttctgtgatttctatagaaaccaatataatggtggaaatgcccgctggggatatcgttttagttttagtttttgacaagtggatgtgtaattaatatgtgatcacgcgatctgttgtttcgtgcttcttcgctttggtactatc

SEQ ID NO: 2726 - DNA, 234 bp, Zea mays
gggagccgagacatagagatgtcacccaacaacaggagtcatatatatgatatgattagcaaggagttgcttaccgatctaccttgtcttctagcggtgatgctaaagctcactagtagacttgttagttgtgggttctgaatcactaagtatcaatcgagggatattgattttagtgggagtagactattaaatgtttaatatgatttactctgtcatggatatttttgtctt

SEQ ID NO: 2727 - DNA, 238 bp, Zea mays
gtgaggagtgataatgggacggaattcaagaacacaggtgttgaagaattcttaggtgaagaaggaatcaaacatgagttctcggttccttacactctacaacaaaatggtgtcgtggaaagaaagaaccgaactctaattgaagcagctagaactatgttagatgagtacaagacacctgacaacttttgggcagaggcggtcaacaccacctgtcatgcaatcaaccgtctctatc

SEQ ID NO: 2728 - DNA, 51 bp, Zea mays
ctgtagcacccgtgctaagtactctatggtttggggctttagcaggtttat

SEQ ID NO: 2729 - DNA, 63 bp, Zea mays
cccctctccaccccatgcatatggtagttcgtgatgaagtttccatagctgggcggaagagat

SEQ ID NO: 2730 - DNA, 70 bp, Zea mays
tcggcatgtgtagcataggtgtttttcaagttttgaagttttcttctttccttgcttgttgcctgctaca

SEQ ID NO: 2731 - DNA, 80 bp, Zea mays
tgataggccgggtgtgtaagcgcagcgatgcgttgagctaaccggtactaatgaaccgtgaggcttaaccttacaacgcc

SEQ ID NO: 2732 - DNA, 405 bp, Zea mays
gtcctctccatctctatggcacaaccgtttgggtcatccatcattacaaaacattcaaaaattagccaataataatcagattatatgttctagcgagtcaagtagtatgtctgtgtgtgacgcttgtcaacaaggcaagagtcaccaattaccttatctagtgtcaacaagtgtctctaccaagccttaacaactcgttttctcggatgtatggggcccagccctcgagtccattgatcgaaagaaattctatgtcagttttatagatgattttaacaaattcagctggatttatttgctgaaacataattctgaagtgttccaaagttttactgagtttcaaaccatggttgagcgcctatttgacaccaaaattattgctatgcaaacagactggggaggcga

SEQ ID NO: 2733 - DNA, 339 bp, Zea mays
tttggctgaaaggataagggaggaaattatagagatgtttcacaggaggaggaggattgcacagaagttgcaaggaaggattttaccgtcggttctgcgtatcctacacggcagaacaagaggtttaagtcatttatcagtacgtaaagctgacaactacattgctgaggtaaggaacaacaatgatgtgcattccaagcatattgtcaatgctcatttgcgggaatgttcttgcaaagagtggcagtacacgggcaaaccatgtatccatgctttgtgcttgataacagcaaacgggcaaaccatgtatccatgctttttattcttttttcagctaga

SEQ ID NO: 2734 - DNA, 58 bp, Zea mays
ctctccgccccatgcatatggtagttcgtgatgaagttttcatagctgggcggaagag

SEQ ID NO: 2735 - DNA, 112 bp, Zea mays
ggaatgttgtctggttcaaggtcttgctttccgatttgaggatgatccatgcttgcatgtgtagttttttttgttcctcagatctacaagatctcggaccaggcttcattcc

SEQ ID NO: 2736 - DNA, 403 bp, Zea mays
tataatgttcgcggaaggccaccttgaattcttcccatgttatctgatgattggccagttgaacgaccacggaatttccccaccaggtgctggcagggccgcgcagttgctgggctgcgaataaaggcttctaggttttagaacagcgcagaagtccgaatttttgctcgataacccgaatccattcgtcggcttctaacgggtcttcagctttaacaaacaggggtggacgtgtctctgagaagtccaagtaagaagtttcgcgggggccctgttgataaccccgcctgccttattgctgaaactgttgacccgccatctctctcagaaaacgggtattatccgcggtcgcgttcactaaggcggcaatcgcctcagcaagtgtgggagggacaggaggtgg

SEQ ID NO: 2737 - DNA, 108 bp, Zea mays
tgttggcatggctcaatcaactcgccggccgcgggtggcttatagcttaattctgcgcattcgatcgaggtgcgggcgcagtgtttaattgattgagccgtgccaata

SEQ ID NO: 2738 - DNA, 222 bp, Zea mays
gatctccgggggaggaggatggagaggcacatcaggcgaacgagggacaaaaggcatgcccatggaggaagcttgacgacgaagattgtcgtcagtctcccgctgacgccgtgccacctcatggacatcagcagaaatgttgcggcacatggagaaaaatgtcgcaagcccattgaccaagcgagcacccatcccgcggccacgacctcgaccacgaccacg

SEQ ID NO: 2739 - DNA, 42 bp, Zea mays
ggctggtggggctcgggcgaaggcctgggcctctttagacct

SEQ ID NO: 2740 - DNA, 238 bp, Zea mays
tccatccactctcgccttagtctcttcacaacatttagagccttctctctcactcacctcaatcggttcacagtttcaaaacctcttcaatcatggtgcgtcgtcgtaacccttctgtgattgagtttagcagcgactcggacgagattcaggaggaatctcccgtcccctctcctccgcctcgtcgctccctctctaagagaggacgtggctctggtaggatggatggagagggttc

SEQ ID NO: 2741 - DNA, 281 bp, Zea mays
tcaacgggctggcggatgtggttctcggcggactccgactctgacctctcgcgtgggtactgcgcctgcctcgtcgccgcgctggacggggccaaacctgaggacgtcctcgccgtcgaccccgccgatcccgacctcgcgccgctcggggcggggacaacggcggcctggtcgcgggccagcacgtggcataatgtgcttgtcggcatgcagaagcgggcgcgcacggccatcgcggcgcgcgagggtaggcaccccgggaagccgtttccgtcgctcgt

SEQ ID NO: 2742 - DNA, 69 bp, Zea mays
tagccaagcatgatttgcccgtagtctgactctgagtgtgctcctgctacgggcaaatcatcttggcca

SEQ ID NO: 2743 - DNA, 71 bp, Zea mays
tccccaagaaacatcaacccatactacatcaacgctatatcaactgggaaggatgtgaggctattggggac

SEQ ID NO: 2744 - DNA, 53 bp, Artificial sequence
  Predicted folded 24-nts-long seq pre-mir
ttcaattcggctcaatcttttctaaaaaaaaaaaagactgagccgaattgaaa

SEQ ID NO: 2745 - DNA, 385 bp, Artificial sequence
  Predicted folded 24-nts-long seq pre-mir
tttttcttgcgtaaagctctatatttaaatttgaggcaccaatttggggcaatgttggaaatgctctaaagacatacaactctgagacactaattcggtttttcaagtataagatacgactaaaaaattacatggtacttcttctgtctcagaatataaggtgtaaccactttttattcttgtcttataatataagacgtgctctctttatggacacatacatcgatatagtgatatatagagaattaaatgtattttttggtctttgaaccagtggtaattagagcagtcccaacgcaccaggtcatccagtttctagagaattaattatactgccatgtcaccaatttgatgatgtggcaaggagtttaatgaagaaagagag

SEQ ID NO: 2746 - DNA, 49 bp, Artificial sequence
  Predicted folded 24-nts-long seq pre-mir
actgatgacggcactgaggaggctacggaggcttacttgaggttgcatc

SEQ ID NO: 2747 - DNA, 253 bp, Artificial sequence
  Predicted folded 24-nts-long seq pre-mir
agaggagccagagccgaagccgttttaagaatagtaggagcgggcctaataaaagctctggcttctctttagaaaaagctaaagtcctgtcaaatacttttttatacgacttattgcaaaaagtacctaaaagctatagctatttttgtactacatagaagaagccacaaatagtagcttcaccggctctggctctaacactttggctccatttggtagttcctcttaaaacagttccggctctggctcctct

SEQ ID NO: 2748 - DNA, 420 bp, Artificial sequence
  Predicted folded 24-nts-long seq pre-mir
atgcttgtatttttagcttctttctggcattctaatcatttgtcaatgctaactcaattgccttttctattatgtttgtgcattgtacaagtgctgatttttttctcactgatcgtaatgagggcctgatagtaatgtcatgacccacaacttaatcacttatagaactagaggatttagttgcgaatccggacaaggtcggttaagtagatgttggccgctgccgaacttctcgagcacggggatgcagtcaagcaggtggtcgatgtccctagcgtggatgatggtagcgtagagtccaatctccctaaaggcaggggaacatggcagcgtagccccgcgggagcgtggcggtgtctgggaagcgccagaagccgaggtagagggtgcagagggaggcaaggtggaggacgttgatga

SEQ ID NO: 2749 - DNA, 42 bp, Artificial sequence
  Predicted folded 24-nts-long seq pre-mir
gtcaccaaattagccctaagggctgatttggtgacaagggga

SEQ ID NO: 2750 - DNA, 52 bp, Artificial sequence
  Predicted folded 24-nts-long seq pre-mir
aggttcaatcggtcgtaacccttcatttatataaagggaggaggtctggacc

SEQ ID NO: 2751 - DNA, 355 bp, Artificial sequence
  Predicted folded 24-nts-long seq pre-mir
atcggtcagctggaggagaaaggtaacgtgtgccctagaagcacccgcccctagacgagccccgaggcaccgagcccggggttgggcatggtggaactagatacaagggttgggtgagccgaagggaatccacttgagtggatcccttgcccaacccgagatcggcctgtcataagtgaacgaccacattaacgacgcctagcgctaagccatagtagaggcatgtaacaccctgaatattggggtataaattttctttgctccattttcaaaattcaggtgttactctttcctttcttcgcttttattttctctttattgaaaccatagagagttatttgttctatgttggcat

SEQ ID NO: 2752 - DNA, 161 bp, Artificial sequence
  Predicted folded 24-nts-long seq pre-mir
tagcacatcatatgtactctatgccccctaatccatacctagctactgactatggtacacaacttcccctattcacacaccacatgtggattggcggatttctaatagttggtgctgctgcacatgcagccatttttatggtaagagactatgatccaact

SEQ ID NO: 2753 - DNA, 41 bp, Artificial sequence
  Predicted folded 24-nts-long seq pre-mir
gatccttatcaaaagctcaattttgtactggatcggggcat

SEQ ID NO: 2754 - DNA, 255 bp, Artificial sequence
  Predicted folded 24-nts-long seq pre-mir
cagaggagccagagccgaagccgttttaagaatagtaggagcgggcctaataaaagctctggcttctctttagaaaaagctaaagtcctgtcaaatacttttttatacgacttattgcaaaaagtacctaaaagctatagctatttttgtactacatagaagaagccacaaatagtagcttcaccggctctggctctaacactttggctccatttggtagttcctcttaaaacagttccggctctggctcctctg

SEQ ID NO: 2755 - DNA, 245 bp, Artificial sequence
  Predicted folded 24-nts-long seq pre-mir
tgcattttctaccgaagtttagcttcgtacgctagtgaggacatttcttaaatacacttgttaatcgaatgagctagatgttagacaaatgatctttgacattcaaatgatcttcgaatttttttccttacacccttaagacaatcactaggtgagtgtccgtgcattgcaacgggaacatataataccgttgaaggaagggagcagaggggagagtgtatcggctggacagggaagaagagcac

SEQ ID NO: 2756 - DNA, 79 bp, Artificial sequence
  Predicted folded 24-nts-long seq pre-mir
cggaccactttctctctcaagtcactaatcactaatgatctcttttctcaattgtgaaacttggagagatggaggcttt

SEQ ID NO: 2757 - DNA, 418 bp, Artificial sequence
  Predicted folded 24-nts-long seq pre-mir
caccagatccgctcccttccctcccgtcagcagtagaggcgcaagaagctgtagagaacccgtctcccttcccataagcacgacagaggaaacacacgagacacatgatatagggttggaactatggcctctttctgatctctgtattatgaggggttgtacatgttccttatatagagatgtgagacccatcagtggcaaaacaggtatttgcccacataaccctaactggggttacttaacatatataaggaacttgtacaccccctcataatagagagaagagaaaaaagccagaggcccaaccctatatcatgtgtctcgtgtgttcctctgtcgagattctgggaagggagacggatcctctacaacttctcgtgcctctactgccgacgagagagaagggagcggatctggt

SEQ ID NO: 2758 - DNA, 52 bp, Artificial sequence
  Predicted folded 24-nts-long seq pre-mir
tcaatctccacgtgcttcgtgcgctgatgctgcacgggattggtggagaggt

SEQ ID NO: 2759 - DNA, 235 bp, Artificial sequence
  Predicted folded 24-nts-long seq pre-mir
gtcctctatactcaaatacctatattagagacattttttatttttattttttatacatacatatttgtcataatctcaaatgtattatttatattttagttttgctaaaccggttatttaaagtatttaaatggatagatggcggtttagagaaactctatatatagataatccagcagcgtcctctaaatttagagaaccatttagaagacgctgctggagagcgtagaggacc

SEQ ID NO: 2760 - DNA, 305 bp, Artificial sequence
  Predicted folded 24-nts-long seq pre-mir
gattttccctcctctcacagcccgggttttgagagcgagtgaaggggctcgcttgtgttagcccacgagcgccgggaaacgcccaaaggtgtagcgttgagtgggctaggccgggaaggtcgctgacaattggtatcagaggcagacagtcgccataccgcccgaaaagggggatgggatgtcaggagcctagccgttagcgcccggctttagtaccacctcgctagccggagggggccgtggtgagcttataagtgagatttcccctcctctcacagcccgggttttgagagcgagtgaagggg

SEQ ID NO: 2761 - DNA, 136 bp, Artificial sequence
  Predicted folded 24-nts-long seq pre-mir
ggtattggggtggattgaggtggattttgactagttgtggatttattccccctcaatccacatatccactggatatgtggattgagggggaataaatccacaactagtcaaaatccacctcaatccacccagtaac

SEQ ID NO: 2762 - DNA, 341 bp, Artificial sequence
  Predicted folded 24-nts-long seq pre-mir
ggtggcgatgcaagaggagctcaacaacttcactaggaatgaggtatggcatttagttccacgtcctaatcaaaatgttgtaggaaccaaatgggtcttccgcaacaagcaagatgagcatggtgtggtgacaaggaacaaagctcgacttgtggccaaaggatactcccaagtcgaaggtttggatttcggtgaaacctatgcacccgtagctaggcttgagtcaattcgtatattattggcctatgatacttaccatggctttaagctttatcaaatggacgtgaaaagtgccttcctcaatggaccaatcaaggaagaggtctatgttgagcaacctc

SEQ ID NO: 2763 - DNA, 269 bp, Artificial sequence
  Predicted folded 24-nts-long seq pre-mir
tactttctatccaacaacgtcctctaaatcacgtcctctatatgtaaatacctatattaaagacatttttaattttttaatttttgtacatacatatttgtcatactcttaaatgtattttacatattttagttttattaaaccggttgtttgaagtattcaaatagatagagaaccgtttagagaaactctacatatagaggatccaacaacgttctctaaatttagaggaccgtttagaggacgttgctggagagagtagaggacgt

SEQ ID NO: 2764 - DNA, 415 bp, Zea mays
aaaagagaaaccgaagacacatgtacaaaaacttcctataggaatacacaaggaaataatacaattggccaaaatagataatgaggatcatctccatatcattttgcatttctcaacaaatataatctgtttggctattctaagtggttctttttttctgggtaaagaagaacttgtcattttgaattcttgggttcaggaatttttctataacttaaatgattcaataaaagctttttttattcttttagttactgatttttttgttggatttcactctacccgcggttgggaactactaattcgttgggtctacaacaatcttggatgggctcctaacgagctaattttcactatttttgtttgtagttttcctgtgattctagacacgtgtttgaaattttgggtctttttt

SEQ ID NO: 2765 - DNA, 284 bp, Zea mays
aaagaggatgaggagtagcatgggaagattgtggaggtgatgatggatgtaaagaaactaaagtttgaggagacgaagatggttggtgatgagatgacgacggcgttggtggatcaaccaattcgacatctcttcaaggccaaaggatgaaatttttgatggcttgtccaagtgtctcgattccttcgggcccagggatgtctagcatgtcgtcctcagatccttggacgaccatcgtcacttctaccctgcaataatcatctggtatgtcgcttccatgaaac

SEQ ID NO: 2766 - DNA, 76 bp, Zea mays
aatacacatgggttgaggaggattgggtgtaaattaaactaatttacatctcaatccacctcaactcatgtgtatt

SEQ ID NO: 2767 - DNA, 420 bp, Zea mays
agaagcggactgccaaggaggcctgggacgccatcgctgcgacccgcatcggcagcgaccgtgcccgcaagaccacactgcagacacttcgcaaggagtgggagaacctggccttcaagccaggtgaggatgttgatgactttgctctccgcctcaacactctgttgcagaagatggtgcagttcggcgacgacacctacgatgaggagagagctgttgagaagctcttccgttgcatccccgagaagtacaagcagattgcttgctcgatcgagtctctgctagacctctccacgatgacgatcgaagaggcgataggtcgtctcaaggtggtcgacggcgacgaaccacaggctccctctgggcctatcactatcggcgggaagctacatctcactcgggagcagtgggaggcctgcc

SEQ ID NO: 2768 - DNA, 167 bp, Zea mays
agagggtttggggatagagggacttgaaccctcatgacttataaagtcgacggatttttcttttactagaaatttcattgttctcagtattgacatgtagaatgggcctccctccttatcctcgtccgatcaagtccgtagcgtctaccgattttgctatatcccca

SEQ ID NO: 2769 - DNA, 142 bp, Zea mays
acagggacgaggcagagcatgggtagggggccatcaacagaattccaaatttgatttctgtttgctcgctcacaaaatggagggactcaccacaaacacactcaggcgttgttgctccctcccctgcactgcctcttccctg

SEQ ID NO: 2770 - DNA, 158 bp, Zea mays
tggcgatggtgcaaataccttccgtgcttttaacccaactcaagctgaagaaacttattcaatggtcactgctaaccgcttttggtcccaaatctttggtgttgctttttccaataaacgttggttacatttctttatgctatttgtacccgtcacca

SEQ ID NO: 2771 - DNA, 76 bp, Zea mays
tttttttctctacaaaagaaacctgattctaggctgtgaagcaaaactaaagggatgtggataaaaggagagatga

SEQ ID NO: 2772 - DNA, 110 bp, Zea mays
ggtccaccttctccaggcttaccaaaacagtgctcgaagggcaagttggcagaaatatattcacatatgtggacgacattgtcgtcgccaacaggagcaaggaggaccat

SEQ ID NO: 2773 - DNA, 415 bp, Zea mays
ctgagttgagaaagagatgcttgaatcaaaagaattccttttttgaagttcaatttttataagaggacaatatgaatattacaccatgttccattaaaacactcaaggggttatatgatatatcgggtgtagaagtagggcaacacttctattggcaaataggaggtttccaaattcatgcccaagtactcatcacttcttaggtcgtaattactattttgctaggttcagttatcatagctgttcggaatccacaaaccatcccgaccgatggtcagaatttcttcgaatatgtccttgagtttattcgagacttgagcaaaactcagattggagaagaatatggtccctgggttccctttattggaactatgttcctttttatttttgtttcgaattggtcaggtactctttt

SEQ ID NO: 2774 - DNA, 108 bp, Zea mays
ctgatgggaggtggagttgcatcgtcccgacggtcaacgcagcaactcttgcattattgcctacccggaaatcaacttctcctcttttcacgcttctacttcttatca

SEQ ID NO: 2775 - DNA, 261 bp, Zea mays
caagatgttccctctttgcatttattgcgattctttctccactattattcgaattggaatagttttattacttcaatgaaatccatttttcttttgaaaaaagaaaataaaagactatttcgattcctatataactcttatgtatcagaatatgaatttttcttgttgtttcttcataaacaatcttcttgcttacgattaacatcttctggaacctttctggaacgaatcatcttttctgggaagatggaacattttggt

SEQ ID NO: 2776 - DNA, 76 bp, Zea mays
tccttaagtgaggagtccctagggggctcatcacccacagaaaaaccagatgctgaagatgtacgatgatgaggag

SEQ ID NO: 2777 - DNA, 243 bp, Zea mays
tatgatcccaaacgatagattcgttgagttcttgccaataaccatggccgctggataaaaacattaaactgaaagcccagacaaaatgagcgcctaagaaaaaaagaccatatgcagataatgaagaaccataaaactggattacttgggatgcctgtgtccacaagaaatctcgaagccaaccattaatcgtaatggaactctacgtggcaagaactcattgaatctatcgtttgggctcat

SEQ ID NO: 2778 - DNA, 355 bp, Zea mays
gacgagctacaaaaggattcgtttttttcgtgtcacacctgattactccttttttcattttaaagagtggcatcctatgtgcactatctcgatcgaggtatggaggtcagaataaatagaataataatgaatggaaaaaagagaaaatcctttagctggataaggggcggatgtagccaagtggatcaaggcagtggattgtgaatccaccatgcgcgagttcaatttccagtcgttcgcccatcgcattattggaaattccgaaaatgcaattttccatattcctagttacgtatttacttacggcgacaaagaaaaaaactatcactatattttttccttttcctagttcttc

SEQ ID NO: 2779 - DNA, 144 bp, Zea mays
attctcacaaccctcccagtctataaacctatgtctgacgactgggtgtttcttagaaagaatgacagaattgtagaagtcagcctggaaaagattccagaaccgagggtcctggacaccaggatgacgaggagtgagagtagg

SEQ ID NO: 2780 - DNA, 42 bp, Zea mays
gggcatcttctggtaggaggacatcatccccttcttccagaa

SEQ ID NO: 2781 - DNA, 201 bp, Zea mays
tacggaagaagagcaagttttttctttgatgttcaccaaaacaattcacttttctttccatggatcacacagtgagcgtatttggtatttggatattatccgtatcaatgacctggtgaatcctcttactcttaattaatcattagacaaaattaataaactagaaaagatcgatatcaagataaaacttgcacattttcc

SEQ ID NO: 2782 - DNA, 82 bp, Zea mays
gctttgtgcatctctacgctcgcctaagccaagaagataaggcggtcatgctcaaacttctagaaagagcgagagaacaaag

SEQ ID NO: 2783 - DNA, 243 bp, Zea mays
tgatattatggacgagtggttacaaagggacaatttcgtttttgaaggatggtccggcttattgctttttccttgtgcttatttcgctttagggggttggtttacccatggattggctagttcctatttggaaggttgcaatttcttaaccgtggcagtttccacacctgccaatagtttagcacactctttgttgctactatggggaccagaagcacagggatattttactcgttggtgtca

SEQ ID NO: 2784 - DNA, 75 bp, Zea mays
tggaaggggcatgcagaggagcacgaacgaggtgtggttggcccctcgttagctctcctgtgcctgcctcttcca

SEQ ID NO: 2785 - DNA, 74 bp, Zea mays
ttgagcgcagcgttgatgagccagccgccgtgcctcccctgtcggctgcggcggctcaccagcgctgcactcaa

SEQ ID NO: 2786 - DNA, 164 bp, Zea mays
ctaaacaacctagattatcctccattaaagtgtatctatttcagatagaatcctttaagttgaaaaaatctatcttatcctaataggttcatcttgtgttaaaaaaattatcttatcctaataggttcattttaggtttttttggataacgggtagtttggagt

SEQ ID NO: 2787 - DNA, 80 bp, Zea mays
agctgccgactcattcacccacatgccaagcaaacggccatggaaaccagctttgcagatgagtgaatgaagcgggaggt

SEQ ID NO: 2788 - DNA, 222 bp, Zea mays
atgaagtgtaatcagggaaaaaacagatgccgaaggtggagtcctcaaaggtggagtcccgaggtggctcatcagccgccgaaaaaacagatgccgaagatgtacgatgatcaggaggaggtggagggtggtggtggtaaccagagccggatggcctagggtcaccaggaatgggtcccggacctgggtaaggaggcggagggtgggaggatgattgacccg

SEQ ID NO: 2789 - DNA, 141 bp, Zea mays
gcgggggcgaactgagaacacatgagaataatgagatgagattgctcgcctcgcggtacggttcgtgctggcctggaccaccgtcgtcgccgttcatcttgtacgcataataatgctgcatgtgttctcaggtcgcccccg

SEQ ID NO: 2790 - DNA, 81 bp, Zea mays
actccctctgtttctttttagttgtcgctggatagtgcaaaattgaactatccagtgacaactaaaaagaaacagagggag

SEQ ID NO: 2791 - DNA, 56 bp, Zea mays
gggccgggccggccggtccgcctcacggcgagaaccgaccggctcgacccttctgc

SEQ ID NO: 2792 - DNA, 243 bp, Zea mays
tccctcactccaaccattctcgccttagcctctccacggtgtttagagcctcctctctcactcacctcaaccggttcatagttccaaaacctctccaatcatggtgcgtcgtcgcaacccttccgtgattgagtttagcagcgactcggatgagattcaggaggaatctcccgtcccctctctccgcctcgtcgctccctctctaagagaggacgcggctctggtaggatggatggagagggt

SEQ ID NO: 2793 - DNA, 224 bp, Zea mays
tccgaagtttccctcaggatagctggagcccacacgagttctatcgggtaaagccaatgattagaggcatcgggggcgcaacgccctcgacctattctcaaactttaaataggtaggacggcgcggctgcttcggtgagccgtgccacggaatcgggagctccaagtgggccatttttggtaagcagaactggcgatgcgggatgaaccggaagccgggttacg
